United States Patent Application Publication US 2008/0064029 A1 - sequence listing, part 2

SEQ ID NO: 12462 - DNA, 22 bp, Artificial Sequence
  bisulfite treated nucleic acid for analysis of methylation status of SEQ ID NO: 9
cccgtaaacgataacaaaaata

SEQ ID NO: 12463 - DNA, 16 bp, Artificial Sequence
  bisulfite treated nucleic acid for analysis of methylation status of SEQ ID NO: 9
gaagtcgtcggatcgg

SEQ ID NO: 12464 - DNA, 21 bp, Artificial Sequence
  bisulfite treated nucleic acid for analysis of methylation status of SEQ ID NO: 9
gttggggatttttttgttaaa

SEQ ID NO: 12465 - DNA, 22 bp, Artificial Sequence
  bisulfite treated nucleic acid for analysis of methylation status of SEQ ID NO: 9
agaatcggtagttgaagattcg

SEQ ID NO: 12466 - DNA, 17 bp, Artificial Sequence
  bisulfite treated nucleic acid for analysis of methylation status of SEQ ID NO: 9
tttgagacggatggtgt

SEQ ID NO: 12467 - DNA, 20 bp, Artificial Sequence
  bisulfite treated nucleic acid for analysis of methylation status of SEQ ID NO: 9
aatcggtagttgaagattcg

SEQ ID NO: 12468 - DNA, 22 bp, Artificial Sequence
  bisulfite treated nucleic acid for analysis of methylation status of SEQ ID NO: 9
acgtctaaaacgaaacttaaaa

SEQ ID NO: 12469 - DNA, 22 bp, Artificial Sequence
  bisulfite treated nucleic acid for analysis of methylation status of SEQ ID NO: 9
agtaaggatagtcgttgtcgtc

SEQ ID NO: 12470 - DNA, 17 bp, Artificial Sequence
  bisulfite treated nucleic acid for analysis of methylation status of SEQ ID NO: 9
agtattcgattcggcga

SEQ ID NO: 12471 - DNA, 18 bp, Artificial Sequence
  bisulfite treated nucleic acid for analysis of methylation status of SEQ ID NO: 9
ggagtgtttgatagaagg

SEQ ID NO: 12472 - DNA, 20 bp, Artificial Sequence
  bisulfite treated nucleic acid for analysis of methylation status of SEQ ID NO: 9
cgaacaaaattaacgattcc

SEQ ID NO: 12473 - DNA, 18 bp, Artificial Sequence
  bisulfite treated nucleic acid for analysis of methylation status of SEQ ID NO: 9
ttcgttttagacgttcgt

SEQ ID NO: 12474 - DNA, 22 bp, Artificial Sequence
  bisulfite treated nucleic acid for analysis of methylation status of SEQ ID NO: 9
aaaactcgaacaaaattaacga

SEQ ID NO: 12475 - DNA, 21 bp, Artificial Sequence
  bisulfite treated nucleic acid for analysis of methylation status of SEQ ID NO: 9
gtttttagtattcgattcggc

SEQ ID NO: 12476 - DNA, 23 bp, Artificial Sequence
  bisulfite treated nucleic acid for analysis of methylation status of SEQ ID NO: 9
gttatgtattattcgttttagga

SEQ ID NO: 12477 - DNA, 22 bp, Artificial Sequence
  bisulfite treated nucleic acid for analysis of methylation status of SEQ ID NO: 9
aaaaactcgaacaaaattaacg

SEQ ID NO: 12478 - DNA, 20 bp, Artificial Sequence
  bisulfite treated nucleic acid for analysis of methylation status of SEQ ID NO: 9
tttttagtattcgattcggc

SEQ ID NO: 12479 - DNA, 23 bp, Artificial Sequence
  bisulfite treated nucleic acid for analysis of methylation status of SEQ ID NO: 9
ttatgtattattcgttttaggaa

SEQ ID NO: 12480 - DNA, 20 bp, Artificial Sequence
  bisulfite treated nucleic acid for analysis of methylation status of SEQ ID NO: 9
gccgaatcgaatactaaaaa

SEQ ID NO: 12481 - DNA, 22 bp, Artificial Sequence
  bisulfite treated nucleic acid for analysis of methylation status of SEQ ID NO: 9
ttagggtagttgtcgtcgttat

SEQ ID NO: 12482 - DNA, 16 bp, Artificial Sequence
  bisulfite treated nucleic acid for analysis of methylation status of SEQ ID NO: 9
gtcgttcgtgagcgat

SEQ ID NO: 12483 - DNA, 22 bp, Artificial Sequence
  bisulfite treated nucleic acid for analysis of methylation status of SEQ ID NO: 9
attagggtagttgtcgtcgtta

SEQ ID NO: 12484 - DNA, 22 bp, Artificial Sequence
  bisulfite treated nucleic acid for analysis of methylation status of SEQ ID NO: 9
taaaacgaaacttaaaaatcgc

SEQ ID NO: 12485 - DNA, 24 bp, Artificial Sequence
  bisulfite treated nucleic acid for analysis of methylation status of SEQ ID NO: 9
taatagtaaggatagtcgttgtcg

SEQ ID NO: 12486 - DNA, 21 bp, Artificial Sequence
  bisulfite treated nucleic acid for analysis of methylation status of SEQ ID NO: 9
aaaacgaaacttaaaaatcgc

SEQ ID NO: 12487 - DNA, 23 bp, Artificial Sequence
  bisulfite treated nucleic acid for analysis of methylation status of SEQ ID NO: 9
aatagtaaggatagtcgttgtcg

SEQ ID NO: 12488 - DNA, 21 bp, Artificial Sequence
  bisulfite treated nucleic acid for analysis of methylation status of SEQ ID NO: 9
tcgaacaaaattaacgattcc

SEQ ID NO: 12489 - DNA, 22 bp, Artificial Sequence
  bisulfite treated nucleic acid for analysis of methylation status of SEQ ID NO: 9
ctcgaacaaaattaacgattcc

SEQ ID NO: 12490 - DNA, 21 bp, Artificial Sequence
  bisulfite treated nucleic acid for analysis of methylation status of SEQ ID NO: 9
gccgaatcgaatactaaaaac

SEQ ID NO: 12491 - DNA, 19 bp, Artificial Sequence
  bisulfite treated nucleic acid for analysis of methylation status of SEQ ID NO: 9
taggagtgtttgatagaag

SEQ ID NO: 12492 - DNA, 21 bp, Artificial Sequence
  bisulfite treated nucleic acid for analysis of methylation status of SEQ ID NO: 9
aattagggtagttgtcgtcgt

SEQ ID NO: 12493 - DNA, 21 bp, Artificial Sequence
  bisulfite treated nucleic acid for analysis of methylation status of SEQ ID NO: 9
aaactcgaacaaaattaacga

SEQ ID NO: 12494 - DNA, 23 bp, Artificial Sequence
  bisulfite treated nucleic acid for analysis of methylation status of SEQ ID NO: 9
tagtaaggatagtcgttgtcgtc

SEQ ID NO: 12495 - DNA, 22 bp, Artificial Sequence
  bisulfite treated nucleic acid for analysis of methylation status of SEQ ID NO: 9
cgtctaaaacgaaacttaaaaa

SEQ ID NO: 12496 - DNA, 25 bp, Artificial Sequence
  bisulfite treated nucleic acid for analysis of methylation status of SEQ ID NO: 9
ataatagtaaggatagtcgttgtcg

SEQ ID NO: 12497 - DNA, 21 bp, Artificial Sequence
  bisulfite treated nucleic acid for analysis of methylation status of SEQ ID NO: 9
gtaaggatagtcgttgtcgtc

SEQ ID NO: 12498 - DNA, 23 bp, Artificial Sequence
  bisulfite treated nucleic acid for analysis of methylation status of SEQ ID NO: 9
atagtaaggatagtcgttgtcgt

SEQ ID NO: 12499 - DNA, 21 bp, Artificial Sequence
  bisulfite treated nucleic acid for analysis of methylation status of SEQ ID NO: 9
cgtctaaaacgaaacttaaaa

SEQ ID NO: 12500 - DNA, 21 bp, Artificial Sequence
  bisulfite treated nucleic acid for analysis of methylation status of SEQ ID NO: 9
tagggtagttgtcgtcgttat

SEQ ID NO: 12501 - DNA, 22 bp, Artificial Sequence
  bisulfite treated nucleic acid for analysis of methylation status of SEQ ID NO: 9
aaattaacgattcctaaaacga

SEQ ID NO: 12502 - DNA, 18 bp, Artificial Sequence
  bisulfite treated nucleic acid for analysis of methylation status of SEQ ID NO: 9
cgtgagcgatgataggag

SEQ ID NO: 12503 - DNA, 21 bp, Artificial Sequence
  bisulfite treated nucleic acid for analysis of methylation status of SEQ ID NO: 9
gatagaagggtttttagtatt

SEQ ID NO: 12504 - DNA, 22 bp, Artificial Sequence
  bisulfite treated nucleic acid for analysis of methylation status of SEQ ID NO: 9
aactcgaacaaaattaacgatt

SEQ ID NO: 12505 - DNA, 20 bp, Artificial Sequence
  bisulfite treated nucleic acid for analysis of methylation status of SEQ ID NO: 9
taaggatagtcgttgtcgtc

SEQ ID NO: 12506 - DNA, 22 bp, Artificial Sequence
  bisulfite treated nucleic acid for analysis of methylation status of SEQ ID NO: 9
aaactcgaacaaaattaacgat

SEQ ID NO: 12507-12844 - skipped (338 entries)

SEQ ID NO: 12845 - DNA, 22 bp, Artificial Sequence
  bisulfite treated nucleic acid for analysis of methylation status of SEQ ID NO: 11
gcgtgaatatgcgttagagtag

SEQ ID NO: 12846 - DNA, 22 bp, Artificial Sequence
  bisulfite treated nucleic acid for analysis of methylation status of SEQ ID NO: 11
cgacatcgtaaaactaaacgta

SEQ ID NO: 12847 - DNA, 21 bp, Artificial Sequence
  bisulfite treated nucleic acid for analysis of methylation status of SEQ ID NO: 11
gtcgggtatcgatattatcgt

SEQ ID NO: 12848 - DNA, 16 bp, Artificial Sequence
  bisulfite treated nucleic acid for analysis of methylation status of SEQ ID NO: 11
tagcgtcgggttacgt

SEQ ID NO: 12849 - DNA, 22 bp, Artificial Sequence
  bisulfite treated nucleic acid for analysis of methylation status of SEQ ID NO: 11
cgtgaatatgcgttagagtagc

SEQ ID NO: 12850 - DNA, 22 bp, Artificial Sequence
  bisulfite treated nucleic acid for analysis of methylation status of SEQ ID NO: 11
aatatgcgttagagtagcgagt

SEQ ID NO: 12851 - DNA, 20 bp, Artificial Sequence
  bisulfite treated nucleic acid for analysis of methylation status of SEQ ID NO: 11
gacaataactcctcgtcgtc

SEQ ID NO: 12852 - DNA, 23 bp, Artificial Sequence
  bisulfite treated nucleic acid for analysis of methylation status of SEQ ID NO: 11
tacgtttagttttacgatgtcgg

SEQ ID NO: 12853 - DNA, 22 bp, Artificial Sequence
  bisulfite treated nucleic acid for analysis of methylation status of SEQ ID NO: 11
atcgtgtagcgtcgggttacgt

SEQ ID NO: 12854 - DNA, 21 bp, Artificial Sequence
  bisulfite treated nucleic acid for analysis of methylation status of SEQ ID NO: 11
gaatatgcgttagagtagcga

SEQ ID NO: 12855 - DNA, 21 bp, Artificial Sequence
  bisulfite treated nucleic acid for analysis of methylation status of SEQ ID NO: 11
acgaaaacgacaataactcct

SEQ ID NO: 12856 - DNA, 16 bp, Artificial Sequence
  bisulfite treated nucleic acid for analysis of methylation status of SEQ ID NO: 11
gtggtttcgcggagga

SEQ ID NO: 12857 - DNA, 21 bp, Artificial Sequence
  bisulfite treated nucleic acid for analysis of methylation status of SEQ ID NO: 11
aggagttattgtcgttttcgt

SEQ ID NO: 12858 - DNA, 22 bp, Artificial Sequence
  bisulfite treated nucleic acid for analysis of methylation status of SEQ ID NO: 11
taaatacaacgcgacttcctac

SEQ ID NO: 12859 - DNA, 25 bp, Artificial Sequence
  bisulfite treated nucleic acid for analysis of methylation status of SEQ ID NO: 11
gtcgttttcgttgggtaatttacgt

SEQ ID NO: 12860 - DNA, 18 bp, Artificial Sequence
  bisulfite treated nucleic acid for analysis of methylation status of SEQ ID NO: 11
gttatgatagagaggtgg

SEQ ID NO: 12861 - DNA, 22 bp, Artificial Sequence
  bisulfite treated nucleic acid for analysis of methylation status of SEQ ID NO: 11
ctaaatacaacgcgacttccta

SEQ ID NO: 12862 - DNA, 21 bp, Artificial Sequence
  bisulfite treated nucleic acid for analysis of methylation status of SEQ ID NO: 11
gtttagttttacgatgtcggg

SEQ ID NO: 12863 - DNA, 22 bp, Artificial Sequence
  bisulfite treated nucleic acid for analysis of methylation status of SEQ ID NO: 11
taactctaacgaacaacacacg

SEQ ID NO: 12864 - DNA, 21 bp, Artificial Sequence
  bisulfite treated nucleic acid for analysis of methylation status of SEQ ID NO: 11
gtcgtcgttttcgttgggtaa

SEQ ID NO: 12865 - DNA, 19 bp, Artificial Sequence
  bisulfite treated nucleic acid for analysis of methylation status of SEQ ID NO: 11
gacgaggagttattgtcgt

SEQ ID NO: 12866 - DNA, 20 bp, Artificial Sequence
  bisulfite treated nucleic acid for analysis of methylation status of SEQ ID NO: 11
tttagttttacgatgtcggg

SEQ ID NO: 12867 - DNA, 21 bp, Artificial Sequence
  bisulfite treated nucleic acid for analysis of methylation status of SEQ ID NO: 11
gacgaggagttattgtcgttt

SEQ ID NO: 12868 - DNA, 22 bp, Artificial Sequence
  bisulfite treated nucleic acid for analysis of methylation status of SEQ ID NO: 11
gttagagtagcgagtcgggtat

SEQ ID NO: 12869 - DNA, 21 bp, Artificial Sequence
  bisulfite treated nucleic acid for analysis of methylation status of SEQ ID NO: 11
gacgaaaacgacaataactcc

SEQ ID NO: 12870 - DNA, 21 bp, Artificial Sequence
  bisulfite treated nucleic acid for analysis of methylation status of SEQ ID NO: 11
ttagagtagcgagtcgggtat

SEQ ID NO: 12871 - DNA, 20 bp, Artificial Sequence
  bisulfite treated nucleic acid for analysis of methylation status of SEQ ID NO: 11
cgaaaacgacaataactcct

SEQ ID NO: 12872 - DNA, 22 bp, Artificial Sequence
  bisulfite treated nucleic acid for analysis of methylation status of SEQ ID NO: 11
gaatatgcgttagagtagcgag

SEQ ID NO: 12873 - DNA, 23 bp, Artificial Sequence
  bisulfite treated nucleic acid for analysis of methylation status of SEQ ID NO: 11
cgacatcgtaaaactaaacgtaa

SEQ ID NO: 12874 - DNA, 21 bp, Artificial Sequence
  bisulfite treated nucleic acid for analysis of methylation status of SEQ ID NO: 11
atcgatattatcgtgtagcgt

SEQ ID NO: 12875 - DNA, 20 bp, Artificial Sequence
  bisulfite treated nucleic acid for analysis of methylation status of SEQ ID NO: 11
gggttacgtatatttggttt

SEQ ID NO: 12876 - DNA, 21 bp, Artificial Sequence
  bisulfite treated nucleic acid for analysis of methylation status of SEQ ID NO: 11
acgacgaaaacgacaataact

SEQ ID NO: 12877 - DNA, 21 bp, Artificial Sequence
  bisulfite treated nucleic acid for analysis of methylation status of SEQ ID NO: 11
cccgacatcgtaaaactaaac

SEQ ID NO: 12878 - DNA, 20 bp, Artificial Sequence
  bisulfite treated nucleic acid for analysis of methylation status of SEQ ID NO: 11
cgacgaaaacgacaataact

SEQ ID NO: 12879 - DNA, 21 bp, Artificial Sequence
  bisulfite treated nucleic acid for analysis of methylation status of SEQ ID NO: 11
aaatacaacgcgacttcctac

SEQ ID NO: 12880 - DNA, 22 bp, Artificial Sequence
  bisulfite treated nucleic acid for analysis of methylation status of SEQ ID NO: 11
gaggagttattgtcgttttcgt

SEQ ID NO: 12881 - DNA, 22 bp, Artificial Sequence
  bisulfite treated nucleic acid for analysis of methylation status of SEQ ID NO: 11
acgaggagttattgtcgttttc

SEQ ID NO: 12882 - DNA, 20 bp, Artificial Sequence
  bisulfite treated nucleic acid for analysis of methylation status of SEQ ID NO: 11
cctaaatacaacgcgacttc

SEQ ID NO: 12883 - DNA, 20 bp, Artificial Sequence
  bisulfite treated nucleic acid for analysis of methylation status of SEQ ID NO: 11
tcctaaatacaacgcgactt

SEQ ID NO: 12884 - DNA, 21 bp, Artificial Sequence
  bisulfite treated nucleic acid for analysis of methylation status of SEQ ID NO: 11
acgaggagttattgtcgtttt

SEQ ID NO: 12885 - DNA, 21 bp, Artificial Sequence
  bisulfite treated nucleic acid for analysis of methylation status of SEQ ID NO: 11
cgaggagttattgtcgttttc

SEQ ID NO: 12886 - DNA, 21 bp, Artificial Sequence
  bisulfite treated nucleic acid for analysis of methylation status of SEQ ID NO: 11
ctcctaaatacaacgcgactt

SEQ ID NO: 12887 - DNA, 21 bp, Artificial Sequence
  bisulfite treated nucleic acid for analysis of methylation status of SEQ ID NO: 11
aactctaacgaacaacacacg

SEQ ID NO: 12888 - DNA, 19 bp, Artificial Sequence
  bisulfite treated nucleic acid for analysis of methylation status of SEQ ID NO: 11
caataactcctcgtcgtcc

SEQ ID NO: 12889 - DNA, 22 bp, Artificial Sequence
  bisulfite treated nucleic acid for analysis of methylation status of SEQ ID NO: 11
ttacgtttagttttacgatgtc

SEQ ID NO: 12890 - DNA, 20 bp, Artificial Sequence
  bisulfite treated nucleic acid for analysis of methylation status of SEQ ID NO: 11
ggagttattgtcgttttcgt

SEQ ID NO: 12891 - DNA, 20 bp, Artificial Sequence
  bisulfite treated nucleic acid for analysis of methylation status of SEQ ID NO: 11
acaataactcctcgtcgtcc

SEQ ID NO: 12892 - DNA, 22 bp, Artificial Sequence
  bisulfite treated nucleic acid for analysis of methylation status of SEQ ID NO: 11
acgtttagttttacgatgtcgg

SEQ ID NO: 12893 - DNA, 19 bp, Artificial Sequence
  bisulfite treated nucleic acid for analysis of methylation status of SEQ ID NO: 11
cgacgaaaacgacaataac

SEQ ID NO: 12894 - DNA, 19 bp, Artificial Sequence
  bisulfite treated nucleic acid for analysis of methylation status of SEQ ID NO: 11
acgacgaaaacgacaataa

SEQ ID NO: 12895 - DNA, 20 bp, Artificial Sequence
  bisulfite treated nucleic acid for analysis of methylation status of SEQ ID NO: 11
aatacaacgcgacttcctac

SEQ ID NO: 12896 - DNA, 21 bp, Artificial Sequence
  bisulfite treated nucleic acid for analysis of methylation status of SEQ ID NO: 11
gcgtgaatatgcgttagagta

SEQ ID NO: 12897 - DNA, 21 bp, Artificial Sequence
  bisulfite treated nucleic acid for analysis of methylation status of SEQ ID NO: 11
tacgatgtcggggaagagcgg

SEQ ID NO: 12898 - DNA, 21 bp, Artificial Sequence
  bisulfite treated nucleic acid for analysis of methylation status of SEQ ID NO: 11
aatatgcgttagagtagcgag

SEQ ID NO: 12899 - DNA, 21 bp, Artificial Sequence
  bisulfite treated nucleic acid for analysis of methylation status of SEQ ID NO: 11
cgtttagttttacgatgtcgg

SEQ ID NO: 12900 - DNA, 20 bp, Artificial Sequence
  nucleic acid for analysis of methylation status of SEQ ID NO: 11
ctcctaaatacaacgcgact

SEQ ID NO: 12901 - DNA, 20 bp, Artificial Sequence
  bisulfite treated nucleic acid for analysis of methylation status of SEQ ID NO: 11
aaaacgacaataactcctcg

SEQ ID NO: 12902 - DNA, 21 bp, Artificial Sequence
  bisulfite treated nucleic acid for analysis of methylation status of SEQ ID NO: 11
gaaaacgacaataactcctcg

SEQ ID NO: 12903 - DNA, 19 bp, Artificial Sequence
  bisulfite treated nucleic acid for analysis of methylation status of SEQ ID NO: 11
attttcggaagtttgtcgt

SEQ ID NO: 12904 - DNA, 21 bp, Artificial Sequence
  bisulfite treated nucleic acid for analysis of methylation status of SEQ ID NO: 11
cgcgtctctctactttcaata

SEQ ID NO: 12905 - DNA, 18 bp, Artificial Sequence
  bisulfite treated nucleic acid for analysis of methylation status of SEQ ID NO: 11
atgcgtggtcgttttcgg

SEQ ID NO: 12906 - DNA, 19 bp, Artificial Sequence
  bisulfite treated nucleic acid for analysis of methylation status of SEQ ID NO: 11
agttgcggtttgttatcgt

SEQ ID NO: 12907 - DNA, 20 bp, Artificial Sequence
  bisulfite treated nucleic acid for analysis of methylation status of SEQ ID NO: 11
tagagtagcgagtcgggtat

SEQ ID NO: 12908 - DNA, 20 bp, Artificial Sequence
  bisulfite treated nucleic acid for analysis of methylation status of SEQ ID NO: 11
acgaaaacgacaataactcc

SEQ ID NO: 12909 - DNA, 22 bp, Artificial Sequence
  bisulfite treated nucleic acid for analysis of methylation status of SEQ ID NO: 11
gacatcgtaaaactaaacgtaa

SEQ ID NO: 12910 - DNA, 22 bp, Artificial Sequence
  bisulfite treated nucleic acid for analysis of methylation status of SEQ ID NO: 11
tgaatatgcgttagagtagcga

SEQ ID NO: 12911 - DNA, 21 bp, Artificial Sequence
  bisulfite treated nucleic acid for analysis of methylation status of SEQ ID NO: 11
atttttcgcgtctctctactt

SEQ ID NO: 12912 - DNA, 21 bp, Artificial Sequence
  bisulfite treated nucleic acid for analysis of methylation status of SEQ ID NO: 11
aatttttcgcgtctctctact

SEQ ID NO: 12913 - DNA, 20 bp, Artificial Sequence
  bisulfite treated nucleic acid for analysis of methylation status of SEQ ID NO: 11
aagtcgcgttgtatttagga

SEQ ID NO: 12914 - DNA, 20 bp, Artificial Sequence
  bisulfite treated nucleic acid for analysis of methylation status of SEQ ID NO: 11
gacgaaacgcaaaactaaac

SEQ ID NO: 12915 - DNA, 16 bp, Artificial Sequence
  bisulfite treated nucleic acid for analysis of methylation status of SEQ ID NO: 11
ttcggaattcggacgt

SEQ ID NO: 12916 - DNA, 20 bp, Artificial Sequence
  bisulfite treated nucleic acid for analysis of methylation status of SEQ ID NO: 11
tgtaatcgtttttttcggag

SEQ ID NO: 12917 - DNA, 19 bp, Artificial Sequence
  bisulfite treated nucleic acid for analysis of methylation status of SEQ ID NO: 11
aataactcctcgtcgtcct

SEQ ID NO: 12918 - DNA, 23 bp, Artificial Sequence
  bisulfite treated nucleic acid for analysis of methylation status of SEQ ID NO: 11
ataactctaacgaacaacacacg

SEQ ID NO: 12919 - DNA, 21 bp, Artificial Sequence
  bisulfite treated nucleic acid for analysis of methylation status of SEQ ID NO: 11
atatgcgttagagtagcgagt

SEQ ID NO: 12920 - DNA, 20 bp, Artificial Sequence
  bisulfite treated nucleic acid for analysis of methylation status of SEQ ID NO: 11
cgaggagttattgtcgtttt

SEQ ID NO: 12921 - DNA, 20 bp, Artificial Sequence
  bisulfite treated nucleic acid for analysis of methylation status of SEQ ID NO: 11
atattatcgtgtagcgtcgg

SEQ ID NO: 12922 - DNA, 16 bp, Artificial Sequence
  bisulfite treated nucleic acid for analysis of methylation status of SEQ ID NO: 11
agcggtggtttcgcgg

SEQ ID NO: 12923 - DNA, 22 bp, Artificial Sequence
  bisulfite treated nucleic acid for analysis of methylation status of SEQ ID NO: 11
tatcgccccgaaaataaaaata

SEQ ID NO: 12924 - DNA, 22 bp, Artificial Sequence
  bisulfite treated nucleic acid for analysis of methylation status of SEQ ID NO: 11
aattaacgatggtaggtcgtag

SEQ ID NO: 12925 - DNA, 21 bp, Artificial Sequence
  bisulfite treated nucleic acid for analysis of methylation status of SEQ ID NO: 11
agcgtttagtttcgtaggcgg

SEQ ID NO: 12926 - DNA, 16 bp, Artificial Sequence
  bisulfite treated nucleic acid for analysis of methylation status of SEQ ID NO: 11
agggtcggaggcggtt

SEQ ID NO: 12927 - DNA, 22 bp, Artificial Sequence
  bisulfite treated nucleic acid for analysis of methylation status of SEQ ID NO: 11
attaacgatggtaggtcgtagt

SEQ ID NO: 12928 - DNA, 22 bp, Artificial Sequence
  bisulfite treated nucleic acid for analysis of methylation status of SEQ ID NO: 11
cgaaccaactcctacgactact

SEQ ID NO: 12929 - DNA, 20 bp, Artificial Sequence
  bisulfite treated nucleic acid for analysis of methylation status of SEQ ID NO: 11
ggttaggtgtacgtgattcg

SEQ ID NO: 12930 - DNA, 17 bp, Artificial Sequence
  bisulfite treated nucleic acid for analysis of methylation status of SEQ ID NO: 11
gtcggtgttcgattcgt

SEQ ID NO: 12931 - DNA, 18 bp, Artificial Sequence
  bisulfite treated nucleic acid for analysis of methylation status of SEQ ID NO: 11
ttggcgtatgtttacgta

SEQ ID NO: 12932 - DNA, 20 bp, Artificial Sequence
  bisulfite treated nucleic acid for analysis of methylation status of SEQ ID NO: 11
aaccgcctactctaataccg

SEQ ID NO: 12933 - DNA, 21 bp, Artificial Sequence
  bisulfite treated nucleic acid for analysis of methylation status of SEQ ID NO: 11
gtggagttagtagtttcgcgt

SEQ ID NO: 12934 - DNA, 16 bp, Artificial Sequence
  bisulfite treated nucleic acid for analysis of methylation status of SEQ ID NO: 11
ttcgttcggtaagcga

SEQ ID NO: 12935 - DNA, 19 bp, Artificial Sequence
  bisulfite treated nucleic acid for analysis of methylation status of SEQ ID NO: 11
gttcgcgtttaagatgtaa

SEQ ID NO: 12936 - DNA, 20 bp, Artificial Sequence
  bisulfite treated nucleic acid for analysis of methylation status of SEQ ID NO: 11
gagttagtagtttcgcgtgg

SEQ ID NO: 12937 - DNA, 20 bp, Artificial Sequence
  bisulfite treated nucleic acid for analysis of methylation status of SEQ ID NO: 11
tggagttagtagtttcgcgt

SEQ ID NO: 12938 - DNA, 19 bp, Artificial Sequence
  bisulfite treated nucleic acid for analysis of methylation status of SEQ ID NO: 11
gaaaccgaacgatacgaac

SEQ ID NO: 12939 - DNA, 21 bp, Artificial Sequence
  bisulfite treated nucleic acid for analysis of methylation status of SEQ ID NO: 11
tacggtattagagtaggcggt

SEQ ID NO: 12940 - DNA, 16 bp, Artificial Sequence
  bisulfite treated nucleic acid for analysis of methylation status of SEQ ID NO: 11
ggcgggcggagcgtat

SEQ ID NO: 12941 - DNA, 16 bp, Artificial Sequence
  bisulfite treated nucleic acid for analysis of methylation status of SEQ ID NO: 11
gtttggagcgcgcggg

SEQ ID NO: 12942 - DNA, 20 bp, Artificial Sequence
  bisulfite treated nucleic acid for analysis of methylation status of SEQ ID NO: 11
acgtaaacatacgccaaaac

SEQ ID NO: 12943 - DNA, 20 bp, Artificial Sequence
  bisulfite treated nucleic acid for analysis of methylation status of SEQ ID NO: 11
atatcgtggagttgaacgtg

SEQ ID NO: 12944 - DNA, 22 bp, Artificial Sequence
  bisulfite treated nucleic acid for analysis of methylation status of SEQ ID NO: 11
tatgtgatttggtgttgtatgg

SEQ ID NO: 12945 - DNA, 18 bp, Artificial Sequence
  bisulfite treated nucleic acid for analysis of methylation status of SEQ ID NO: 11
ctatcgccccgaaaataa

SEQ ID NO: 12946 - DNA, 17 bp, Artificial Sequence
  bisulfite treated nucleic acid for analysis of methylation status of SEQ ID NO: 11
gtcggaggcggttacgt

SEQ ID NO: 12947 - DNA, 18 bp, Artificial Sequence
  bisulfite treated nucleic acid for analysis of methylation status of SEQ ID NO: 11
tgttggaagcgtttagtt

SEQ ID NO: 12948 - DNA, 17 bp, Artificial Sequence
  bisulfite treated nucleic acid for analysis of methylation status of SEQ ID NO: 11
tatcgccccgaaaataa

SEQ ID NO: 12949 - DNA, 22 bp, Artificial Sequence
  bisulfite treated nucleic acid for analysis of methylation status of SEQ ID NO: 11
ttaacgatggtaggtcgtagtt

SEQ ID NO: 12950 - DNA, 19 bp, Artificial Sequence
  bisulfite treated nucleic acid for analysis of methylation status of SEQ ID NO: 11
accgcctactctaataccg

SEQ ID NO: 12951 - DNA, 21 bp, Artificial Sequence
  bisulfite treated nucleic acid for analysis of methylation status of SEQ ID NO: 11
aaaccgcctactctaataccg

SEQ ID NO: 12952 - DNA, 20 bp, Artificial Sequence
  bisulfite treated nucleic acid for analysis of methylation status of SEQ ID NO: 11
ttcgcgtttaagatgtaaat

SEQ ID NO: 12953 - DNA, 20 bp, Artificial Sequence
  bisulfite treated nucleic acid for analysis of methylation status of SEQ ID NO: 11
ccgaatcacgtacacctaac

SEQ ID NO: 12954 - DNA, 19 bp, Artificial Sequence
  bisulfite treated nucleic acid for analysis of methylation status of SEQ ID NO: 11
ggtagtggtttttcgtcgt

SEQ ID NO: 12955 - DNA, 23 bp, Artificial Sequence
  bisulfite treated nucleic acid for analysis of methylation status of SEQ ID NO: 11
ttcgatatcgtggagttgaacgt

SEQ ID NO: 12956 - DNA, 17 bp, Artificial Sequence
  bisulfite treated nucleic acid for analysis of methylation status of SEQ ID NO: 11
ttcgcggagttatcgtt

SEQ ID NO: 12957 - DNA, 22 bp, Artificial Sequence
  bisulfite treated nucleic acid for analysis of methylation status of SEQ ID NO: 11
ttacggtattagagtaggcggt

SEQ ID NO: 12958 - DNA, 22 bp, Artificial Sequence
  bisulfite treated nucleic acid for analysis of methylation status of SEQ ID NO: 11
gttacggtattagagtaggcgg

SEQ ID NO: 12959 - DNA, 21 bp, Artificial Sequence
  bisulfite treated nucleic acid for analysis of methylation status of SEQ ID NO: 11
atcgccccgaaaataaaaata

SEQ ID NO: 12960 - DNA, 19 bp, Artificial Sequence
  bisulfite treated nucleic acid for analysis of methylation status of SEQ ID NO: 11
tatcgtggagttgaacgtg

SEQ ID NO: 12961 - DNA, 22 bp, Artificial Sequence
  bisulfite treated nucleic acid for analysis of methylation status of SEQ ID NO: 12
ttagtaatttcggtttttcgtt

SEQ ID NO: 12962 - DNA, 20 bp, Artificial Sequence
  bisulfite treated nucleic acid for analysis of methylation status of SEQ ID NO: 12
cccgaatacgctaaaaataa

SEQ ID NO: 12963 - DNA, 18 bp, Artificial Sequence
  bisulfite treated nucleic acid for analysis of methylation status of SEQ ID NO: 12
tttgtgtgggggatatgg

SEQ ID NO: 12964 - DNA, 19 bp, Artificial Sequence
  bisulfite treated nucleic acid for analysis of methylation status of SEQ ID NO: 12
ttcgttttttaggcgtgta

SEQ ID NO: 12965 - DNA, 22 bp, Artificial Sequence
  bisulfite treated nucleic acid for analysis of methylation status of SEQ ID NO: 12
tagtaatttcggtttttcgttt

SEQ ID NO: 12966 - DNA, 20 bp, Artificial Sequence
  bisulfite treated nucleic acid for analysis of methylation status of SEQ ID NO: 12
tcccgaatacgctaaaaata

SEQ ID NO: 12967 - DNA, 21 bp, Artificial Sequence
  bisulfite treated nucleic acid for analysis of methylation status of SEQ ID NO: 12
ctcccgaatacgctaaaaata

SEQ ID NO: 12968 - DNA, 21 bp, Artificial Sequence
  bisulfite treated nucleic acid for analysis of methylation status of SEQ ID NO: 12
atacatctcccgaatacgcta

SEQ ID NO: 12969 - DNA, 22 bp, Artificial Sequence
  bisulfite treated nucleic acid for analysis of methylation status of SEQ ID NO: 12
tttagtaatttcggtttttcgt

SEQ ID NO: 12970 - DNA, 22 bp, Artificial Sequence
  bisulfite treated nucleic acid for analysis of methylation status of SEQ ID NO: 12
aatacatctcccgaatacgcta

SEQ ID NO: 12971 - DNA, 20 bp, Artificial Sequence
  bisulfite treated nucleic acid for analysis of methylation status of SEQ ID NO: 12
tacatctcccgaatacgcta

SEQ ID NO: 12972 - DNA, 22 bp, Artificial Sequence
  bisulfite treated nucleic acid for analysis of methylation status of SEQ ID NO: 12
tctcccgaatacgctaaaaata

SEQ ID NO: 12973 - DNA, 21 bp, Artificial Sequence
  bisulfite treated nucleic acid for analysis of methylation status of SEQ ID NO: 12
cgaatacgctaaaaataaaca

SEQ ID NO: 12974 - DNA, 22 bp, Artificial Sequence
  bisulfite treated nucleic acid for analysis of methylation status of SEQ ID NO: 12
atctcccgaatacgctaaaaat

SEQ ID NO: 12975 - DNA, 21 bp, Artificial Sequence
  bisulfite treated nucleic acid for analysis of methylation status of SEQ ID NO: 12
agtaatttcggtttttcgttt

SEQ ID NO: 12976 - DNA, 19 bp, Artificial Sequence
  bisulfite treated nucleic acid for analysis of methylation status of SEQ ID NO: 12
acatctcccgaatacgcta

SEQ ID NO: 12977 - DNA, 22 bp, Artificial Sequence
  bisulfite treated nucleic acid for analysis of methylation status of SEQ ID NO: 12
ttttagtaatttcggtttttcg

SEQ ID NO: 12978 - DNA, 20 bp, Artificial Sequence
  bisulfite treated nucleic acid for analysis of methylation status of SEQ ID NO: 12
atacatctcccgaatacgct

SEQ ID NO: 12979 - DNA, 21 bp, Artificial Sequence
  bisulfite treated nucleic acid for analysis of methylation status of SEQ ID NO: 12
ttcggttcgttttttaggcgt

SEQ ID NO: 12980 - DNA, 18 bp, Artificial Sequence
  bisulfite treated nucleic acid for analysis of methylation status of SEQ ID NO: 12
ttcgcgcgggggatacgg

SEQ ID NO: 12981 - DNA, 22 bp, Artificial Sequence
  bisulfite treated nucleic acid for analysis of methylation status of SEQ ID NO: 12
aaatacatctcccgaatacgct

SEQ ID NO: 12982 - DNA, 21 bp, Artificial Sequence
  bisulfite treated nucleic acid for analysis of methylation status of SEQ ID NO: 13
taggttgttttagtcggtcgt

SEQ ID NO: 12983 - DNA, 22 bp, Artificial Sequence
  bisulfite treated nucleic acid for analysis of methylation status of SEQ ID NO: 13
ctccgataaccgttttaatatc

SEQ ID NO: 12984 - DNA, 17 bp, Artificial Sequence
  bisulfite treated nucleic acid for analysis of methylation status of SEQ ID NO: 13
gtcgcggcgattggcga

SEQ ID NO: 12985 - DNA, 20 bp, Artificial Sequence
  bisulfite treated nucleic acid for analysis of methylation status of SEQ ID NO: 13
gaagaagagtaagcgattag

SEQ ID NO: 12986 - DNA, 21 bp, Artificial Sequence
  bisulfite treated nucleic acid for analysis of methylation status of SEQ ID NO: 13
gttgttttagtcggtcgttgt

SEQ ID NO: 12987 - DNA, 22 bp, Artificial Sequence
  bisulfite treated nucleic acid for analysis of methylation status of SEQ ID NO: 13
aaccgttttaatatcctaatcg

SEQ ID NO: 12988 - DNA, 17 bp, Artificial Sequence
  bisulfite treated nucleic acid for analysis of methylation status of SEQ ID NO: 13
aggaggcgaagaagagt

SEQ ID NO: 12989 - DNA, 20 bp, Artificial Sequence
  bisulfite treated nucleic acid for analysis of methylation status of SEQ ID NO: 13
ttgttttagtcggtcgttgt

SEQ ID NO: 12990 - DNA, 19 bp, Artificial Sequence
  bisulfite treated nucleic acid for analysis of methylation status of SEQ ID NO: 13
agaagagtaagcgattagg

SEQ ID NO: 12991 - DNA, 22 bp, Artificial Sequence
  bisulfite treated nucleic acid for analysis of methylation status of SEQ ID NO: 13
ttaggttgttttagtcggtcgt

SEQ ID NO: 12992 - DNA, 22 bp, Artificial Sequence
  bisulfite treated nucleic acid for analysis of methylation status of SEQ ID NO: 13
gttaggttgttttagtcggtcg

SEQ ID NO: 12993 - DNA, 19 bp, Artificial Sequence
  bisulfite treated nucleic acid for analysis of methylation status of SEQ ID NO: 13
ggttgttttagtcggtcgt

SEQ ID NO: 12994 - DNA, 19 bp, Artificial Sequence
  bisulfite treated nucleic acid for analysis of methylation status of SEQ ID NO: 13
gaagagtaagcgattagga

SEQ ID NO: 12995 - DNA, 19 bp, Artificial Sequence
  bisulfite treated nucleic acid for analysis of methylation status of SEQ ID NO: 13
aggttgttttagtcggtcg

SEQ ID NO: 12996 - DNA, 23 bp, Artificial Sequence
  bisulfite treated nucleic acid for analysis of methylation status of SEQ ID NO: 13
taaccgttttaatatcctaatcg

SEQ ID NO: 12997 - DNA, 21 bp, Artificial Sequence
  bisulfite treated nucleic acid for analysis of methylation status of SEQ ID NO: 13
ccgataaccgttttaatatcc

SEQ ID NO: 12998 - DNA, 22 bp, Artificial Sequence
  bisulfite treated nucleic acid for analysis of methylation status of SEQ ID NO: 13
accgttttaatatcctaatcgc

SEQ ID NO: 12999 - DNA, 19 bp, Artificial Sequence
  bisulfite treated nucleic acid for analysis of methylation status of SEQ ID NO: 13
tgttttagtcggtcgttgt

SEQ ID NO: 13000 - DNA, 21 bp, Artificial Sequence
  bisulfite treated nucleic acid for analysis of methylation status of SEQ ID NO: 13
ccgttttaatatcctaatcgc

SEQ ID NO: 13001 - DNA, 22 bp, Artificial Sequence
  bisulfite treated nucleic acid for analysis of methylation status of SEQ ID NO: 13
agtatattagtcggtcgagggt

SEQ ID NO: 13002 - DNA, 22 bp, Artificial Sequence
  bisulfite treated nucleic acid for analysis of methylation status of SEQ ID NO: 13
tactaaacaaaatcccgaaacg

SEQ ID NO: 13003 - DNA, 16 bp, Artificial Sequence
  bisulfite treated nucleic acid for analysis of methylation status of SEQ ID NO: 13
gtttcgcgggcggtag

SEQ ID NO: 13004 - DNA, 17 bp, Artificial Sequence
  bisulfite treated nucleic acid for analysis of methylation status of SEQ ID NO: 13
ttgggagttggaggtaa

SEQ ID NO: 13005 - DNA, 20 bp, Artificial Sequence
  bisulfite treated nucleic acid for analysis of methylation status of SEQ ID NO: 3
gttgagtagtagcgagcgat

SEQ ID NO: 13006 - DNA, 22 bp, Artificial Sequence
  bisulfite treated nucleic acid for analysis of methylation status of SEQ ID NO: 3
aaaatcgacgacctaactaaaa

SEQ ID NO: 13007 - DNA, 18 bp, Artificial Sequence
  bisulfite treated nucleic acid for analysis of methylation status of SEQ ID NO: 3
ttcggatttcggtcgcgt

SEQ ID NO: 13008 - DNA, 19 bp, Artificial Sequence
  bisulfite treated nucleic acid for analysis of methylation status of SEQ ID NO: 3
gtggagtcgtatatacgtt

SEQ ID NO: 13009 - DNA, 21 bp, Artificial Sequence
  bisulfite treated nucleic acid for analysis of methylation status of SEQ ID NO: 3
gtaataggacggaggtttacg

SEQ ID NO: 13010 - DNA, 21 bp, Artificial Sequence
  bisulfite treated nucleic acid for analysis of methylation status of SEQ ID NO: 3
gcgtaacaaacgaaaattcta

SEQ ID NO: 13011 - DNA, 21 bp, Artificial Sequence
  bisulfite treated nucleic acid for analysis of methylation status of SEQ ID NO: 3
ttcgttggcgtttgttatcgg

SEQ ID NO: 13012 - DNA, 19 bp, Artificial Sequence
  bisulfite treated nucleic acid for analysis of methylation status of SEQ ID NO: 3
ggcgagtttcgttgtgtta

SEQ ID NO: 13013 - DNA, 20 bp, Artificial Sequence
  bisulfite treated nucleic acid for analysis of methylation status of SEQ ID NO: 3
atacgagagcgcgttagata

SEQ ID NO: 13014 - DNA, 22 bp, Artificial Sequence
  bisulfite treated nucleic acid for analysis of methylation status of SEQ ID NO: 3
cgaataactacaaacccgtaat

SEQ ID NO: 13015 - DNA, 18 bp, Artificial Sequence
  bisulfite treated nucleic acid for analysis of methylation status of SEQ ID NO: 3
atcgtttttgttcgacgt

SEQ ID NO: 13016 - DNA, 21 bp, Artificial Sequence
  bisulfite treated nucleic acid for analysis of methylation status of SEQ ID NO: 3
tagaatttggtagttttttgg

SEQ ID NO: 13017 - DNA, 20 bp, Artificial Sequence
  bisulfite treated nucleic acid for analysis of methylation status of SEQ ID NO: 3
gacgttgtaataggacggag

SEQ ID NO: 13018 - DNA, 22 bp, Artificial Sequence
  bisulfite treated nucleic acid for analysis of methylation status of SEQ ID NO: 3
cgtaacaaacgaaaattctacc

SEQ ID NO: 13019 - DNA, 20 bp, Artificial Sequence
  bisulfite treated nucleic acid for analysis of methylation status of SEQ ID NO: 3
atcgttgagtagtagcgagc

SEQ ID NO: 13020 - DNA, 22 bp, Artificial Sequence
  bisulfite treated nucleic acid for analysis of methylation status of SEQ ID NO: 3
cgacgacctaactaaaatatcg

SEQ ID NO: 13021 - DNA, 22 bp, Artificial Sequence
  bisulfite treated nucleic acid for analysis of methylation status of SEQ ID NO: 3
aaatcgacgacctaactaaaat

SEQ ID NO: 13022 - DNA, 22 bp, Artificial Sequence
  bisulfite treated nucleic acid for analysis of methylation status of SEQ ID NO: 3
gcgtaacaaacgaaaattctac

SEQ ID NO: 13023 - DNA, 22 bp, Artificial Sequence
  bisulfite treated nucleic acid for analysis of methylation status of SEQ ID NO: 3
acgaataactacaaacccgtaa

SEQ ID NO: 13024 - DNA, 22 bp, Artificial Sequence
  bisulfite treated nucleic acid for analysis of methylation status of SEQ ID NO: 3
tacgaataactacaaacccgta

SEQ ID NO: 13025 - DNA, 21 bp, Artificial Sequence
  bisulfite treated nucleic acid for analysis of methylation status of SEQ ID NO: 3
gtttaagaggaattacgagcg

SEQ ID NO: 13026 - DNA, 23 bp, Artificial Sequence
  bisulfite treated nucleic acid for analysis of methylation status of SEQ ID NO: 3
aaaaacgcgctaaatataactaa

SEQ ID NO: 13027 - DNA, 17 bp, Artificial Sequence
  bisulfite treated nucleic acid for analysis of methylation status of SEQ ID NO: 3
agcgtatttttacgcgg

SEQ ID NO: 13028 - DNA, 20 bp, Artificial Sequence
  bisulfite treated nucleic acid for analysis of methylation status of SEQ ID NO: 3
ttataaacgtttggtttcgt

SEQ ID NO: 13029 - DNA, 22 bp, Artificial Sequence
  bisulfite treated nucleic acid for analysis of methylation status of SEQ ID NO: 3
agtttaagaggaattacgagcg

SEQ ID NO: 13030 - DNA, 20 bp, Artificial Sequence
  bisulfite treated nucleic acid for analysis of methylation status of SEQ ID NO: 3
tttaagaggaattacgagcg

SEQ ID NO: 13031 - DNA, 22 bp, Artificial Sequence
  bisulfite treated nucleic acid for analysis of methylation status of SEQ ID NO: 3
gcgctaaatataactaaaacga

SEQ ID NO: 13032 - DNA, 20 bp, Artificial Sequence
  bisulfite treated nucleic acid for analysis of methylation status of SEQ ID NO: 3
tagatacgagagcgcgttag

SEQ ID NO: 13033 - DNA, 19 bp, Artificial Sequence
  bisulfite treated nucleic acid for analysis of methylation status of SEQ ID NO: 3
tacgagagcgcgttagata

SEQ ID NO: 13034 - DNA, 21 bp, Artificial Sequence
  bisulfite treated nucleic acid for analysis of methylation status of SEQ ID NO: 3
tgatcgttgagtagtagcgag

SEQ ID NO: 13035 - DNA, 23 bp, Artificial Sequence
  bisulfite treated nucleic acid for analysis of methylation status of SEQ ID NO: 3
cgacctaactaaaatatcgacaa

SEQ ID NO: 13036 - DNA, 23 bp, Artificial Sequence
  bisulfite treated nucleic acid for analysis of methylation status of SEQ ID NO: 3
taaaatcgacgacctaactaaaa

SEQ ID NO: 13037 - DNA, 19 bp, Artificial Sequence
  bisulfite treated nucleic acid for analysis of methylation status of SEQ ID NO: 3
tagatacgagagcgcgtta

SEQ ID NO: 13038 - DNA, 22 bp, Artificial Sequence
  bisulfite treated nucleic acid for analysis of methylation status of SEQ ID NO: 3
atacgaataactacaaacccgt

SEQ ID NO: 13039 - DNA, 23 bp, Artificial Sequence
  bisulfite treated nucleic acid for analysis of methylation status of SEQ ID NO: 3
cgctaaatataactaaaacgacc

SEQ ID NO: 13040 - DNA, 20 bp, Artificial Sequence
  bisulfite treated nucleic acid for analysis of methylation status of SEQ ID NO: 3
taataggacggaggtttacg

SEQ ID NO: 13041 - DNA, 22 bp, Artificial Sequence
  bisulfite treated nucleic acid for analysis of methylation status of SEQ ID NO: 3
aaaacgcgctaaatataactaa

SEQ ID NO: 13042 - DNA, 22 bp, Artificial Sequence
  bisulfite treated nucleic acid for analysis of methylation status of SEQ ID NO: 3
agatacgagagcgcgttagata

SEQ ID NO: 13043 - DNA, 21 bp, Artificial Sequence
  bisulfite treated nucleic acid for analysis of methylation status of SEQ ID NO: 3
gatacgagagcgcgttagata

SEQ ID NO: 13044 - DNA, 19 bp, Artificial Sequence
  bisulfite treated nucleic acid for analysis of methylation status of SEQ ID NO: 3
atacgagagcgcgttagat

SEQ ID NO: 13045 - DNA, 22 bp, Artificial Sequence
  bisulfite treated nucleic acid for analysis of methylation status of SEQ ID NO: 3
atatcgacaaaataaaatacgc

SEQ ID NO: 13046 - DNA, 17 bp, Artificial Sequence
  bisulfite treated nucleic acid for analysis of methylation status of SEQ ID NO: 3
ttcgttcgtggagtcgt

SEQ ID NO: 13047 - DNA, 23 bp, Artificial Sequence
  bisulfite treated nucleic acid for analysis of methylation status of SEQ ID NO: 3
tacgttttttattagaggtacgt

SEQ ID NO: 13048 - DNA, 20 bp, Artificial Sequence
  bisulfite treated nucleic acid for analysis of methylation status of SEQ ID NO: 3
ttagatacgagagcgcgtta

SEQ ID NO: 13049 - DNA, 21 bp, Artificial Sequence
  bisulfite treated nucleic acid for analysis of methylation status of SEQ ID NO: 3
tttgatcgttgagtagtagcg

SEQ ID NO: 13050 - DNA, 23 bp, Artificial Sequence
  bisulfite treated nucleic acid for analysis of methylation status of SEQ ID NO: 3
gacgacctaactaaaatatcgac

SEQ ID NO: 13051 - DNA, 20 bp, Artificial Sequence
  bisulfite treated nucleic acid for analysis of methylation status of SEQ ID NO: 3
ttcgtggacgttgtaatagg

SEQ ID NO: 13052 - DNA, 20 bp, Artificial Sequence
  bisulfite treated nucleic acid for analysis of methylation status of SEQ ID NO: 3
ttgagtagtagcgagcgatt

SEQ ID NO: 13053 - DNA, 20 bp, Artificial Sequence
  bisulfite treated nucleic acid for analysis of methylation status of SEQ ID NO: 3
ttttatcggtttgcgtttat

SEQ ID NO: 13054 - DNA, 21 bp, Artificial Sequence
  bisulfite treated nucleic acid for analysis of methylation status of SEQ ID NO: 3
ctcgctactactcaacgatca

SEQ ID NO: 13055 - DNA, 18 bp, Artificial Sequence
  bisulfite treated nucleic acid for analysis of methylation status of SEQ ID NO: 3
atcgttttgaatcgtcgt

SEQ ID NO: 13056 - DNA, 28 bp, Artificial Sequence
  bisulfite treated nucleic acid for analysis of methylation status of SEQ ID NO: 3
ggcgttttggtttgaatagttcgttcgg

SEQ ID NO: 13057 - DNA, 21 bp, Artificial Sequence
  bisulfite treated nucleic acid for analysis of methylation status of SEQ ID NO: 3
cggtagagaaagcgtaagatg

SEQ ID NO: 13058 - DNA, 21 bp, Artificial Sequence
  bisulfite treated nucleic acid for analysis of methylation status of SEQ ID NO: 3
aactaacccgataaaacgaac

SEQ ID NO: 13059 - DNA, 16 bp, Artificial Sequence
  bisulfite treated nucleic acid for analysis of methylation status of SEQ ID NO: 3
ttcgacgtgacgagag

SEQ ID NO: 13060 - DNA, 18 bp, Artificial Sequence
  bisulfite treated nucleic acid for analysis of methylation status of SEQ ID NO: 3
ttcgcgtttcgttttagg

SEQ ID NO: 13061 - DNA, 22 bp, Artificial Sequence
  bisulfite treated nucleic acid for analysis of methylation status of SEQ ID NO: 3
tcgacgacctaactaaaatatc

SEQ ID NO: 13062 - DNA, 22 bp, Artificial Sequence
  bisulfite treated nucleic acid for analysis of methylation status of SEQ ID NO: 3
tttagatacgagagcgcgttag

SEQ ID NO: 13063 - DNA, 21 bp, Artificial Sequence
  bisulfite treated nucleic acid for analysis of methylation status of SEQ ID NO: 3
aaaaactaacccgataaaacg

SEQ ID NO: 13064 - DNA, 22 bp, Artificial Sequence
  bisulfite treated nucleic acid for analysis of methylation status of SEQ ID NO: 3
ttgatcgttgagtagtagcgag

SEQ ID NO: 13065 - DNA, 21 bp, Artificial Sequence
  bisulfite treated nucleic acid for analysis of methylation status of SEQ ID NO: 3
ttagatacgagagcgcgttag

SEQ ID NO: 13066 - DNA, 19 bp, Artificial Sequence
  bisulfite treated nucleic acid for analysis of methylation status of SEQ ID NO: 3
cgtggacgttgtaatagga

SEQ ID NO: 13067 - DNA, 19 bp, Artificial Sequence
  bisulfite treated nucleic acid for analysis of methylation status of SEQ ID NO: 3
tcgtggacgttgtaatagg

SEQ ID NO: 13068 - DNA, 24 bp, Artificial Sequence
  bisulfite treated nucleic acid for analysis of methylation status of SEQ ID NO: 3
aatcgacgacctaactaaaatatc

SEQ ID NO: 13069 - DNA, 20 bp, Artificial Sequence
  bisulfite treated nucleic acid for analysis of methylation status of SEQ ID NO: 3
atcgctcgctactactcaac

SEQ ID NO: 13070 - DNA, 20 bp, Artificial Sequence
  bisulfite treated nucleic acid for analysis of methylation status of SEQ ID NO: 3
gctcgctactactcaacgat

SEQ ID NO: 13071 - DNA, 23 bp, Artificial Sequence
  bisulfite treated nucleic acid for analysis of methylation status of SEQ ID NO: 3
atacgaataactacaaacccgta

SEQ ID NO: 13072 - DNA, 21 bp, Artificial Sequence
  bisulfite treated nucleic acid for analysis of methylation status of SEQ ID NO: 3
tttagatacgagagcgcgtta

SEQ ID NO: 13073 - DNA, 22 bp, Artificial Sequence
  bisulfite treated nucleic acid for analysis of methylation status of SEQ ID NO: 3
tgtaataggacggaggtttacg

SEQ ID NO: 13074 - DNA, 20 bp, Artificial Sequence
  bisulfite treated nucleic acid for analysis of methylation status of SEQ ID NO: 3
acaaaataaaatacgcgacc

SEQ ID NO: 13075 - DNA, 21 bp, Artificial Sequence
  bisulfite treated nucleic acid for analysis of methylation status of SEQ ID NO: 3
gacaaaataaaatacgcgacc

SEQ ID NO: 13076 - DNA, 23 bp, Artificial Sequence
  bisulfite treated nucleic acid for analysis of methylation status of SEQ ID NO: 3
tagtttaagaggaattacgagcg

SEQ ID NO: 13077 - DNA, 22 bp, Artificial Sequence
  bisulfite treated nucleic acid for analysis of methylation status of SEQ ID NO: 3
aatcgacgacctaactaaaata

SEQ ID NO: 13078 - DNA, 21 bp, Artificial Sequence
  nucleic acid for analysis of methylation status of SEQ ID NO: 3
gttgagtagtagcgagcgatt

SEQ ID NO: 13079 - DNA, 21 bp, Artificial Sequence
  bisulfite treated nucleic acid for analysis of methylation status of SEQ ID NO: 3
ctattacaacgtccacgaaaa

SEQ ID NO: 13080 - DNA, 23 bp, Artificial Sequence
  bisulfite treated nucleic acid for analysis of methylation status of SEQ ID NO: 3
ttcgttttaggtttttcgacgtg

SEQ ID NO: 13081 - DNA, 19 bp, Artificial Sequence
  bisulfite treated nucleic acid for analysis of methylation status of SEQ ID NO: 3
gttcgttttatcgggttag

SEQ ID NO: 13082 - DNA, 20 bp, Artificial Sequence
  bisulfite treated nucleic acid for analysis of methylation status of SEQ ID NO: 3
gaattacgagcggaagtttt

SEQ ID NO: 13083 - DNA, 21 bp, Artificial Sequence
  bisulfite treated nucleic acid for analysis of methylation status of SEQ ID NO: 3
tttttatcggtttgcgtttat

SEQ ID NO: 13084 - DNA, 22 bp, Artificial Sequence
  bisulfite treated nucleic acid for analysis of methylation status of SEQ ID NO: 3
aaactaacccgataaaacgaac

SEQ ID NO: 13085 - DNA, 22 bp, Artificial Sequence
  bisulfite treated nucleic acid for analysis of methylation status of SEQ ID NO: 3
ttttagatacgagagcgcgtta

SEQ ID NO: 13086 - DNA, 23 bp, Artificial Sequence
  bisulfite treated nucleic acid for analysis of methylation status of SEQ ID NO: 3
atcgacgacctaactaaaatatc

SEQ ID NO: 13087 - DNA, 20 bp, Artificial Sequence
  bisulfite treated nucleic acid for analysis of methylation status of SEQ ID NO: 3
acgttgtaataggacggagg

SEQ ID NO: 13088 - DNA, 19 bp, Artificial Sequence
  bisulfite treated nucleic acid for analysis of methylation status of SEQ ID NO: 3
cgttgtaataggacggagg

SEQ ID NO: 13089 - DNA, 21 bp, Artificial Sequence
  bisulfite treated nucleic acid for analysis of methylation status of SEQ ID NO: 3
acgttgtaataggacggaggt

SEQ ID NO: 13090 - DNA, 21 bp, Artificial Sequence
  bisulfite treated nucleic acid for analysis of methylation status of SEQ ID NO: 3
aaaactaacccgataaaacga

SEQ ID NO: 13091 - DNA, 21 bp, Artificial Sequence
  bisulfite treated nucleic acid for analysis of methylation status of SEQ ID NO: 3
acgaaaaactaacccgataaa

SEQ ID NO: 13092 - DNA, 18 bp, Artificial Sequence
  bisulfite treated nucleic acid for analysis of methylation status of SEQ ID NO: 3
acgagagcgcgttagata

SEQ ID NO: 13093 - DNA, 20 bp, Artificial Sequence
  bisulfite treated nucleic acid for analysis of methylation status of SEQ ID NO: 3
tcgctactactcaacgatca

SEQ ID NO: 13094 - DNA, 21 bp, Artificial Sequence
  bisulfite treated nucleic acid for analysis of methylation status of SEQ ID NO: 3
ttcgtggagtcgtatatacgt

SEQ ID NO: 13095 - DNA, 23 bp, Artificial Sequence
  bisulfite treated nucleic acid for analysis of methylation status of SEQ ID NO: 3
ttttattagaggtacgttattta

SEQ ID NO: 13096 - DNA, 19 bp, Artificial Sequence
  bisulfite treated nucleic acid for analysis of methylation status of SEQ ID NO: 3
gttagttttcgttggcgtt

SEQ ID NO: 13097 - DNA, 22 bp, Artificial Sequence
  bisulfite treated nucleic acid for analysis of methylation status of SEQ ID NO: 3
cgcaactacgccttaatactac

SEQ ID NO: 13098 - DNA, 26 bp, Artificial Sequence
  bisulfite treated nucleic acid for analysis of methylation status of SEQ ID NO: 3
ttcgattttcggtttatgtagtacgt

SEQ ID NO: 13099 - DNA, 18 bp, Artificial Sequence
  bisulfite treated nucleic acid for analysis of methylation status of SEQ ID NO: 3
ggtggtttagtggtagaa

SEQ ID NO: 13100 - DNA, 19 bp, Artificial Sequence
  bisulfite treated nucleic acid for analysis of methylation status of SEQ ID NO: 3
tcgttgagtagtagcgagc

SEQ ID NO: 13101 - DNA, 20 bp, Artificial Sequence
  bisulfite treated nucleic acid for analysis of methylation status of SEQ ID NO: 3
cgttgtaataggacggaggt

SEQ ID NO: 13102 - DNA, 20 bp, Artificial Sequence
  bisulfite treated nucleic acid for analysis of methylation status of SEQ ID NO: 3
cgtttgttatcggtgtatgg

SEQ ID NO: 13103 - DNA, 16 bp, Artificial Sequence
  bisulfite treated nucleic acid for analysis of methylation status of SEQ ID NO: 3
gtttgttacgcgggag

SEQ ID NO: 13104 - DNA, 21 bp, Artificial Sequence
  bisulfite treated nucleic acid for analysis of methylation status of SEQ ID NO: 3
aatcgctcgctactactcaac

SEQ ID NO: 13105 - DNA, 19 bp, Artificial Sequence
  bisulfite treated nucleic acid for analysis of methylation status of SEQ ID NO: 3
gcggtagagaaagcgtaag

SEQ ID NO: 13106 - DNA, 16 bp, Artificial Sequence
  bisulfite treated nucleic acid for analysis of methylation status of SEQ ID NO: 3
gggacgagtcggtttt

SEQ ID NO: 13107 - DNA, 22 bp, Artificial Sequence
  bisulfite treated nucleic acid for analysis of methylation status of SEQ ID NO: 3
acgacctaactaaaatatcgac

SEQ ID NO: 13108 - DNA, 20 bp, Artificial Sequence
  bisulfite treated nucleic acid for analysis of methylation status of SEQ ID NO: 3
tttatcggtttgcgtttatc

SEQ ID NO: 13109 - DNA, 19 bp, Artificial Sequence
  bisulfite treated nucleic acid for analysis of methylation status of SEQ ID NO: 3
gaattacgagcggaagttt

SEQ ID NO: 13110 - DNA, 21 bp, Artificial Sequence
  bisulfite treated nucleic acid for analysis of methylation status of SEQ ID NO: 3
gattcgcgtttagtaaggttc

SEQ ID NO: 13111 - DNA, 21 bp, Artificial Sequence
  bisulfite treated nucleic acid for analysis of methylation status of SEQ ID NO: 3
catcttacgctttctctaccg

SEQ ID NO: 13112 - DNA, 16 bp, Artificial Sequence
  bisulfite treated nucleic acid for analysis of methylation status of SEQ ID NO: 3
gggcgcgggttacggt

SEQ ID NO: 13113 - DNA, 21 bp, Artificial Sequence
  bisulfite treated nucleic acid for analysis of methylation status of SEQ ID NO: 3
agtaaatttgtttatacgggt

SEQ ID NO: 13114 - DNA, 22 bp, Artificial Sequence
  bisulfite treated nucleic acid for analysis of methylation status of SEQ ID NO: 3
gtaataggacggaggtttacgg

SEQ ID NO: 13115 - DNA, 22 bp, Artificial Sequence
  bisulfite treated nucleic acid for analysis of methylation status of SEQ ID NO: 3
tattacaacgtccacgaaaaac

SEQ ID NO: 13116 - DNA, 19 bp, Artificial Sequence
  bisulfite treated nucleic acid for analysis of methylation status of SEQ ID NO: 3
tgttcgttttatcgggtta

SEQ ID NO: 13117 - DNA, 19 bp, Artificial Sequence
  bisulfite treated nucleic acid for analysis of methylation status of SEQ ID NO: 3
aataggacggaggtttacg

SEQ ID NO: 13118 - DNA, 18 bp, Artificial Sequence
  bisulfite treated nucleic acid for analysis of methylation status of SEQ ID NO: 3
tacggtaggcggtgatta

SEQ ID NO: 13119 - DNA, 22 bp, Artificial Sequence
  bisulfite treated nucleic acid for analysis of methylation status of SEQ ID NO: 3
ctacataaaccgaaaatcgaac

SEQ ID NO: 13120 - DNA, 16 bp, Artificial Sequence
  bisulfite treated nucleic acid for analysis of methylation status of SEQ ID NO: 3
ttcgtttgttacgcgg

SEQ ID NO: 13121 - DNA, 22 bp, Artificial Sequence
  bisulfite treated nucleic acid for analysis of methylation status of SEQ ID NO: 3
atatacgactccacgaacgaat

SEQ ID NO: 13122 - DNA, 20 bp, Artificial Sequence
  bisulfite treated nucleic acid for analysis of methylation status of SEQ ID NO: 3
atcttacgctttctctaccg

SEQ ID NO: 13123 - DNA, 21 bp, Artificial Sequence
  bisulfite treated nucleic acid for analysis of methylation status of SEQ ID NO: 3
tacaacgtccacgaaaaacta

SEQ ID NO: 13124 - DNA, 19 bp, Artificial Sequence
  bisulfite treated nucleic acid for analysis of methylation status of SEQ ID NO: 3
taagaggaattacgagcgg

SEQ ID NO: 13125 - DNA, 23 bp, Artificial Sequence
  bisulfite treated nucleic acid for analysis of methylation status of SEQ ID NO: 3
aaacgcgctaaatataactaaaa

SEQ ID NO: 13126 - DNA, 23 bp, Artificial Sequence
  bisulfite treated nucleic acid for analysis of methylation status of SEQ ID NO: 3
aaaacgcgctaaatataactaaa

SEQ ID NO: 13127 - DNA, 22 bp, Artificial Sequence
  bisulfite treated nucleic acid for analysis of methylation status of SEQ ID NO: 3
cgaaaaactaacccgataaaac

SEQ ID NO: 13128 - DNA, 22 bp, Artificial Sequence
  bisulfite treated nucleic acid for analysis of methylation status of SEQ ID NO: 3
gaaaaactaacccgataaaacg

SEQ ID NO: 13129 - DNA, 21 bp, Artificial Sequence
  bisulfite treated nucleic acid for analysis of methylation status of SEQ ID NO: 3
taataggacggaggtttacgg

SEQ ID NO: 13130 - DNA, 22 bp, Artificial Sequence
  bisulfite treated nucleic acid for analysis of methylation status of SEQ ID NO: 3
cgcgctaaatataactaaaacg

SEQ ID NO: 13131 - DNA, 19 bp, Artificial Sequence
  bisulfite treated nucleic acid for analysis of methylation status of SEQ ID NO: 3
aattacgagcggaagtttt

SEQ ID NO: 13132 - DNA, 20 bp, Artificial Sequence
  bisulfite treated nucleic acid for analysis of methylation status of SEQ ID NO: 3
ttagttatgttagcggcgac

SEQ ID NO: 13133 - DNA, 21 bp, Artificial Sequence
  bisulfite treated nucleic acid for analysis of methylation status of SEQ ID NO: 3
aaactacgacctaaacgcaac

SEQ ID NO: 13134 - DNA, 16 bp, Artificial Sequence
  bisulfite treated nucleic acid for analysis of methylation status of SEQ ID NO: 3
ttcggcgcgtcgttag

SEQ ID NO: 13135 - DNA, 17 bp, Artificial Sequence
  bisulfite treated nucleic acid for analysis of methylation status of SEQ ID NO: 3
atggtcgagcggtttaa

SEQ ID NO: 13136 - DNA, 19 bp, Artificial Sequence
  bisulfite treated nucleic acid for analysis of methylation status of SEQ ID NO: 3
ttcgttttatcgggttagt

SEQ ID NO: 13137 - DNA, 20 bp, Artificial Sequence
  bisulfite treated nucleic acid for analysis of methylation status of SEQ ID NO: 3
aaaactacgacctaaacgca

SEQ ID NO: 13138 - DNA, 19 bp, Artificial Sequence
  bisulfite treated nucleic acid for analysis of methylation status of SEQ ID NO: 3
tagttatgttagcggcgac

SEQ ID NO: 13139 - DNA, 23 bp, Artificial Sequence
  bisulfite treated nucleic acid for analysis of methylation status of SEQ ID NO: 3
cgacttatcaaaaataaaattcg

SEQ ID NO: 13140 - DNA, 19 bp, Artificial Sequence
  bisulfite treated nucleic acid for analysis of methylation status of SEQ ID NO: 3
ggcgttgcgtttaggtcgt

SEQ ID NO: 13141 - DNA, 16 bp, Artificial Sequence
  bisulfite treated nucleic acid for analysis of methylation status of SEQ ID NO: 3
ggcgcgtcgttaggat

SEQ ID NO: 13142 - DNA, 20 bp, Artificial Sequence
  bisulfite treated nucleic acid for analysis of methylation status of SEQ ID NO: 3
gaatcgctcgctactactca

SEQ ID NO: 13143 - DNA, 20 bp, Artificial Sequence
  bisulfite treated nucleic acid for analysis of methylation status of SEQ ID NO: 3
ctccgtcctattacaacgtc

SEQ ID NO: 13144 - DNA, 22 bp, Artificial Sequence
  bisulfite treated nucleic acid for analysis of methylation status of SEQ ID NO: 3
ttttgatcgttgagtagtagcg

SEQ ID NO: 13145 - DNA, 20 bp, Artificial Sequence
  bisulfite treated nucleic acid for analysis of methylation status of SEQ ID NO: 3
aactacgacctaaacgcaac

SEQ ID NO: 13146 - DNA, 20 bp, Artificial Sequence
  bisulfite treated nucleic acid for analysis of methylation status of SEQ ID NO: 3
gatcgttgagtagtagcgag

SEQ ID NO: 13147 - DNA, 19 bp, Artificial Sequence
  bisulfite treated nucleic acid for analysis of methylation status of SEQ ID NO: 3
ttagttttcgttggcgttt

SEQ ID NO: 13148 - DNA, 22 bp, Artificial Sequence
  bisulfite treated nucleic acid for analysis of methylation status of SEQ ID NO: 3
ctaaatctataccgaaaatccg

SEQ ID NO: 13149 - DNA, 20 bp, Artificial Sequence
  bisulfite treated nucleic acid for analysis of methylation status of SEQ ID NO: 3
gtcgtttagggtcgagagat

SEQ ID NO: 13150 - DNA, 19 bp, Artificial Sequence
  bisulfite treated nucleic acid for analysis of methylation status of SEQ ID NO: 3
ttcgcgttcgaatgttcgt

SEQ ID NO: 13151 - DNA, 17 bp, Artificial Sequence
  bisulfite treated nucleic acid for analysis of methylation status of SEQ ID NO: 3
ggtttttaggggaagga

SEQ ID NO: 13152 - DNA, 20 bp, Artificial Sequence
  bisulfite treated nucleic acid for analysis of methylation status of SEQ ID NO: 3
gcaaaataaaacgaatcgac

SEQ ID NO: 13153 - DNA, 22 bp, Artificial Sequence
  bisulfite treated nucleic acid for analysis of methylation status of SEQ ID NO: 3
tattgtagcgtttacgagaggt

SEQ ID NO: 13154 - DNA, 17 bp, Artificial Sequence
  bisulfite treated nucleic acid for analysis of methylation status of SEQ ID NO: 3
tttgaggtggggtgtgg

SEQ ID NO: 13155 - DNA, 17 bp, Artificial Sequence
  bisulfite treated nucleic acid for analysis of methylation status of SEQ ID NO: 3
gtagaaggggaggtttt

SEQ ID NO: 13156 - DNA, 20 bp, Artificial Sequence
  bisulfite treated nucleic acid for analysis of methylation status of SEQ ID NO: 3
caaaataaaacgaatcgacc

SEQ ID NO: 13157 - DNA, 21 bp, Artificial Sequence
  bisulfite treated nucleic acid for analysis of methylation status of SEQ ID NO: 3
tattgtagcgtttacgagagg

SEQ ID NO: 13158 - DNA, 19 bp, Artificial Sequence
  bisulfite treated nucleic acid for analysis of methylation status of SEQ ID NO: 3
tcgtttagggtcgagagat

SEQ ID NO: 13159 - DNA, 22 bp, Artificial Sequence
  bisulfite treated nucleic acid for analysis of methylation status of SEQ ID NO: 3
taaacgctacaataaaacgaaa

SEQ ID NO: 13160 - DNA, 21 bp, Artificial Sequence
  bisulfite treated nucleic acid for analysis of methylation status of SEQ ID NO: 3
ttaacggaagttggtatagcg

SEQ ID NO: 13161 - DNA, 19 bp, Artificial Sequence
  bisulfite treated nucleic acid for analysis of methylation status of SEQ ID NO: 3
attcgttattagtcgtcgt

SEQ ID NO: 13162 - DNA, 19 bp, Artificial Sequence
  bisulfite treated nucleic acid for analysis of methylation status of SEQ ID NO: 3
attggttatcgtttgtcgt

SEQ ID NO: 13163 - DNA, 22 bp, Artificial Sequence
  bisulfite treated nucleic acid for analysis of methylation status of SEQ ID NO: 3
ttattgtagcgtttacgagagg

SEQ ID NO: 13164 - DNA, 22 bp, Artificial Sequence
  bisulfite treated nucleic acid for analysis of methylation status of SEQ ID NO: 3
aacgctacaataaaacgaaaac

SEQ ID NO: 13165 - DNA, 19 bp, Artificial Sequence
  bisulfite treated nucleic acid for analysis of methylation status of SEQ ID NO: 3
cgtttagggtcgagagatt

SEQ ID NO: 13166 - DNA, 21 bp, Artificial Sequence
  bisulfite treated nucleic acid for analysis of methylation status of SEQ ID NO: 3
attgtagcgtttacgagaggt

SEQ ID NO: 13167 - DNA, 22 bp, Artificial Sequence
  bisulfite treated nucleic acid for analysis of methylation status of SEQ ID NO: 3
gtaaacgctacaataaaacgaa

SEQ ID NO: 13168 - DNA, 21 bp, Artificial Sequence
  bisulfite treated nucleic acid for analysis of methylation status of SEQ ID NO: 3
aacgctacaataaaacgaaaa

SEQ ID NO: 13169 - DNA, 20 bp, Artificial Sequence
  bisulfite treated nucleic acid for analysis of methylation status of SEQ ID NO: 3
taacggaagttggtatagcg

SEQ ID NO: 13170 - DNA, 21 bp, Artificial Sequence
  bisulfite treated nucleic acid for analysis of methylation status of SEQ ID NO: 3
aaacgctacaataaaacgaaa

SEQ ID NO: 13171 - DNA, 22 bp, Artificial Sequence
  bisulfite treated nucleic acid for analysis of methylation status of SEQ ID NO: 3
aaacgctacaataaaacgaaaa

SEQ ID NO: 13172 - DNA, 21 bp, Artificial Sequence
  bisulfite treated nucleic acid for analysis of methylation status of SEQ ID NO: 3
cgtaaacgctacaataaaacg

SEQ ID NO: 13173 - DNA, 22 bp, Artificial Sequence
  bisulfite treated nucleic acid for analysis of methylation status of SEQ ID NO: 3
ctcgtaaacgctacaataaaac

SEQ ID NO: 13174 - DNA, 18 bp, Artificial Sequence
  bisulfite treated nucleic acid for analysis of methylation status of SEQ ID NO: 3
acgaatcgacctctctcc

SEQ ID NO: 13175 - DNA, 22 bp, Artificial Sequence
  bisulfite treated nucleic acid for analysis of methylation status of SEQ ID NO: 3
tttcgttttattgtagcgttta

SEQ ID NO: 13176 - DNA, 22 bp, Artificial Sequence
  bisulfite treated nucleic acid for analysis of methylation status of SEQ ID NO: 3
attgtagcgtttacgagaggtt

SEQ ID NO: 13177 - DNA, 20 bp, Artificial Sequence
  bisulfite treated nucleic acid for analysis of methylation status of SEQ ID NO: 3
tgtagcgtttacgagaggtt

SEQ ID NO: 13178 - DNA, 20 bp, Artificial Sequence
  bisulfite treated nucleic acid for analysis of methylation status of SEQ ID NO: 3
gtagcgtttacgagaggttg

SEQ ID NO: 13179 - DNA, 20 bp, Artificial Sequence
  bisulfite treated nucleic acid for analysis of methylation status of SEQ ID NO: 3
ttgtagcgtttacgagaggt

SEQ ID NO: 13180 - DNA, 19 bp, Artificial Sequence
  bisulfite treated nucleic acid for analysis of methylation status of SEQ ID NO: 3
tttttgtcgtttagggtcg

SEQ ID NO: 13181 - DNA, 18 bp, Artificial Sequence
  bisulfite treated nucleic acid for analysis of methylation status of SEQ ID NO: 3
ttttgtcgtttagggtcg

SEQ ID NO: 13182 - DNA, 19 bp, Artificial Sequence
  bisulfite treated nucleic acid for analysis of methylation status of SEQ ID NO: 3
tgtcgtttagggtcgagag

SEQ ID NO: 13183 - DNA, 22 bp, Artificial Sequence
  bisulfite treated nucleic acid for analysis of methylation status of SEQ ID NO: 3
gttttcgttttattgtagcgtt

SEQ ID NO: 13184 - DNA, 21 bp, Artificial Sequence
  bisulfite treated nucleic acid for analysis of methylation status of SEQ ID NO: 3
acgctacaataaaacgaaaac

SEQ ID NO: 13185 - DNA, 22 bp, Artificial Sequence
  bisulfite treated nucleic acid for analysis of methylation status of SEQ ID NO: 3
aaccgataacgtaaatcaaaac

SEQ ID NO: 13186 - DNA, 18 bp, Artificial Sequence
  bisulfite treated nucleic acid for analysis of methylation status of SEQ ID NO: 3
ggaacgggtttcgtagtc

SEQ ID NO: 13187 - DNA, 19 bp, Artificial Sequence
  bisulfite treated nucleic acid for analysis of methylation status of SEQ ID NO: 3
aggttcgtgggcgtttcgt

SEQ ID NO: 13188 - DNA, 17 bp, Artificial Sequence
  bisulfite treated nucleic acid for analysis of methylation status of SEQ ID NO: 3
gtgcggtttagaaacgt

SEQ ID NO: 13189 - DNA, 22 bp, Artificial Sequence
  bisulfite treated nucleic acid for analysis of methylation status of SEQ ID NO: 3
ttcgttttattgtagcgtttac

SEQ ID NO: 13190 - DNA, 21 bp, Artificial Sequence
  bisulfite treated nucleic acid for analysis of methylation status of SEQ ID NO: 3
ttgtagcgtttacgagaggtt

SEQ ID NO: 13191 - DNA, 19 bp, Artificial Sequence
  bisulfite treated nucleic acid for analysis of methylation status of SEQ ID NO: 47
aaaaacgacctcgctactc

SEQ ID NO: 13192 - DNA, 22 bp, Artificial Sequence
  bisulfite treated nucleic acid for analysis of methylation status of SEQ ID NO: 47
cgattcgagttggtagtaaaat

SEQ ID NO: 13193 - DNA, 16 bp, Artificial Sequence
  bisulfite treated nucleic acid for analysis of methylation status of SEQ ID NO: 47
ttcgttttcgagcggg

SEQ ID NO: 13194 - DNA, 18 bp, Artificial Sequence
  bisulfite treated nucleic acid for analysis of methylation status of SEQ ID NO: 47
atcgtcggggggaggggt

SEQ ID NO: 13195 - DNA, 19 bp, Artificial Sequence
  bisulfite treated nucleic acid for analysis of methylation status of SEQ ID NO: 47
aaacgacctcgctactcac

SEQ ID NO: 13196 - DNA, 19 bp, Artificial Sequence
  bisulfite treated nucleic acid for analysis of methylation status of SEQ ID NO: 47
cgacctcgctactcactaa

SEQ ID NO: 13197 - DNA, 19 bp, Artificial Sequence
  bisulfite treated nucleic acid for analysis of methylation status of SEQ ID NO: 47
aacgacctcgctactcact

SEQ ID NO: 13198 - DNA, 21 bp, Artificial Sequence
  bisulfite treated nucleic acid for analysis of methylation status of SEQ ID NO: 47
cgattcgagttggtagtaaaa

SEQ ID NO: 13199 - DNA, 19 bp, Artificial Sequence
  bisulfite treated nucleic acid for analysis of methylation status of SEQ ID NO: 47
aaaacgacctcgctactca

SEQ ID NO: 13200 - DNA, 21 bp, Artificial Sequence
  bisulfite treated nucleic acid for analysis of methylation status of SEQ ID NO: 47
aattctatcaccgaacgatct

SEQ ID NO: 13201 - DNA, 22 bp, Artificial Sequence
  bisulfite treated nucleic acid for analysis of methylation status of SEQ ID NO: 47
tcgtatttattatatttcggat

SEQ ID NO: 13202 - DNA, 19 bp, Artificial Sequence
  bisulfite treated nucleic acid for analysis of methylation status of SEQ ID NO: 47
ttcgtattcgaagaggcgg

SEQ ID NO: 13203 - DNA, 25 bp, Artificial Sequence
  bisulfite treated nucleic acid for analysis of methylation status of SEQ ID NO: 47
gttaatattagtttttatacgaatt

SEQ ID NO: 13204 - DNA, 22 bp, Artificial Sequence
  bisulfite treated nucleic acid for analysis of methylation status of SEQ ID NO: 47
taaacaattctatcaccgaacg

SEQ ID NO: 13205 - DNA, 23 bp, Artificial Sequence
  bisulfite treated nucleic acid for analysis of methylation status of SEQ ID NO: 47
gtttttatacgaattagaaaaga

SEQ ID NO: 13206 - DNA, 20 bp, Artificial Sequence
  bisulfite treated nucleic acid for analysis of methylation status of SEQ ID NO: 47
aacaattctatcaccgaacg

SEQ ID NO: 13207 - DNA, 22 bp, Artificial Sequence
  bisulfite treated nucleic acid for analysis of methylation status of SEQ ID NO: 18
gtttttattagttcggttgtcg

SEQ ID NO: 13208 - DNA, 22 bp, Artificial Sequence
  bisulfite treated nucleic acid for analysis of methylation status of SEQ ID NO: 18
tcttattctctaaacacgacgc

SEQ ID NO: 13209 - DNA, 16 bp, Artificial Sequence
  bisulfite treated nucleic acid for analysis of methylation status of SEQ ID NO: 18
agtttcgcgcgttggg

SEQ ID NO: 13210 - DNA, 16 bp, Artificial Sequence
  bisulfite treated nucleic acid for analysis of methylation status of SEQ ID NO: 18
attgggcggggagtat

SEQ ID NO: 13211 - DNA, 21 bp, Artificial Sequence
  bisulfite treated nucleic acid for analysis of methylation status of SEQ ID NO: 18
cttattctctaaacacgacgc

SEQ ID NO: 13212 - DNA, 21 bp, Artificial Sequence
  bisulfite treated nucleic acid for analysis of methylation status of SEQ ID NO: 18
tttttattagttcggttgtcg

SEQ ID NO: 13213 - DNA, 22 bp, Artificial Sequence
  bisulfite treated nucleic acid for analysis of methylation status of SEQ ID NO: 18
agtataggcgtcgtgtttagag

SEQ ID NO: 13214 - DNA, 21 bp, Artificial Sequence
  bisulfite treated nucleic acid for analysis of methylation status of SEQ ID NO: 18
tatatctttaactcgctcccg

SEQ ID NO: 13215 - DNA, 17 bp, Artificial Sequence
  bisulfite treated nucleic acid for analysis of methylation status of SEQ ID NO: 18
ataggcgcgggaggcgg

SEQ ID NO: 13216 - DNA, 17 bp, Artificial Sequence
  bisulfite treated nucleic acid for analysis of methylation status of SEQ ID NO: 18
gaggagtagttaggtag

SEQ ID NO: 13217 - DNA, 22 bp, Artificial Sequence
  bisulfite treated nucleic acid for analysis of methylation status of SEQ ID NO: 18
ctatatctttaactcgctcccg

SEQ ID NO: 13218 - DNA, 16 bp, Artificial Sequence
  bisulfite treated nucleic acid for analysis of methylation status of SEQ ID NO: 18
ttaggtagcgacgcga

SEQ ID NO: 13219 - DNA, 16 bp, Artificial Sequence
  bisulfite treated nucleic acid for analysis of methylation status of SEQ ID NO: 18
agagataggcgcggga

SEQ ID NO: 13220 - DNA, 22 bp, Artificial Sequence
  bisulfite treated nucleic acid for analysis of methylation status of SEQ ID NO: 18
attctctaaacacgacgcctat

SEQ ID NO: 13221 - DNA, 16 bp, Artificial Sequence
  bisulfite treated nucleic acid for analysis of methylation status of SEQ ID NO: 18
taaattgggcggggag

SEQ ID NO: 13222 - DNA, 20 bp, Artificial Sequence
  bisulfite treated nucleic acid for analysis of methylation status of SEQ ID NO: 18
tctctaaacacgacgcctat

SEQ ID NO: 13223 - DNA, 17 bp, Artificial Sequence
  bisulfite treated nucleic acid for analysis of methylation status of SEQ ID NO: 18
ttttaaattgggcgggg

SEQ ID NO: 13224 - DNA, 21 bp, Artificial Sequence
  bisulfite treated nucleic acid for analysis of methylation status of SEQ ID NO: 18
ttctctaaacacgacgcctat

SEQ ID NO: 13225 - DNA, 21 bp, Artificial Sequence
  bisulfite treated nucleic acid for analysis of methylation status of SEQ ID NO: 18
tattctctaaacacgacgcct

SEQ ID NO: 13226 - DNA, 22 bp, Artificial Sequence
  bisulfite treated nucleic acid for analysis of methylation status of SEQ ID NO: 18
gagtataggcgtcgtgtttaga

SEQ ID NO: 13227 - DNA, 20 bp, Artificial Sequence
  bisulfite treated nucleic acid for analysis of methylation status of SEQ ID NO: 18
atatctttaactcgctcccg

SEQ ID NO: 13228 - DNA, 22 bp, Artificial Sequence
  bisulfite treated nucleic acid for analysis of methylation status of SEQ ID NO: 18
cgtttttattagttcggttgtc

SEQ ID NO: 13229 - DNA, 22 bp, Artificial Sequence
  bisulfite treated nucleic acid for analysis of methylation status of SEQ ID NO: 18
cgcgcctatctcttattctcta

SEQ ID NO: 13230 - DNA, 18 bp, Artificial Sequence
  bisulfite treated nucleic acid for analysis of methylation status of SEQ ID NO: 18
ggcggggagtataggcgt

SEQ ID NO: 13231 - DNA, 20 bp, Artificial Sequence
  bisulfite treated nucleic acid for analysis of methylation status of SEQ ID NO: 18
tttattagttcggttgtcgg

SEQ ID NO: 13232 - DNA, 22 bp, Artificial Sequence
  bisulfite treated nucleic acid for analysis of methylation status of SEQ ID NO: 18
tctaaacacgacgcctatactc

SEQ ID NO: 13233 - DNA, 22 bp, Artificial Sequence
  bisulfite treated nucleic acid for analysis of methylation status of SEQ ID NO: 18
tctctaaacacgacgcctatac

SEQ ID NO: 13234 - DNA, 22 bp, Artificial Sequence
  bisulfite treated nucleic acid for analysis of methylation status of SEQ ID NO: 18
ttattctctaaacacgacgcct

SEQ ID NO: 13235 - DNA, 21 bp, Artificial Sequence
  bisulfite treated nucleic acid for analysis of methylation status of SEQ ID NO: 18
gtataggcgtcgtgtttagag

SEQ ID NO: 13236 - DNA, 16 bp, Artificial Sequence
  bisulfite treated nucleic acid for analysis of methylation status of SEQ ID NO: 18
taggtagcgacgcgag

SEQ ID NO: 13237 - DNA, 21 bp, Artificial Sequence
  bisulfite treated nucleic acid for analysis of methylation status of SEQ ID NO: 18
ctaaacacgacgcctatactc

SEQ ID NO: 13238 - DNA, 19 bp, Artificial Sequence
  bisulfite treated nucleic acid for analysis of methylation status of SEQ ID NO: 18
taattttaaattgggcggg

SEQ ID NO: 13239 - DNA, 21 bp, Artificial Sequence
  bisulfite treated nucleic acid for analysis of methylation status of SEQ ID NO: 18
ctctaaacacgacgcctatac

SEQ ID NO: 13240 - DNA, 22 bp, Artificial Sequence
  bisulfite treated nucleic acid for analysis of methylation status of SEQ ID NO: 18
tataggcgtcgtgtttagagaa

SEQ ID NO: 13241 - DNA, 23 bp, Artificial Sequence
  bisulfite treated nucleic acid for analysis of methylation status of SEQ ID NO: 18
ctcttattctctaaacacgacgc

SEQ ID NO: 13242 - DNA, 22 bp, Artificial Sequence
  bisulfite treated nucleic acid for analysis of methylation status of SEQ ID NO: 18
ctaaacacgacgcctatactcc

SEQ ID NO: 13243 - DNA, 20 bp, Artificial Sequence
  bisulfite treated nucleic acid for analysis of methylation status of SEQ ID NO: 18
tttaattttaaattgggcgg

SEQ ID NO: 13244 - DNA, 19 bp, Artificial Sequence
  bisulfite treated nucleic acid for analysis of methylation status of SEQ ID NO: 18
tatctttaactcgctcccg

SEQ ID NO: 13245 - DNA, 21 bp, Artificial Sequence
  bisulfite treated nucleic acid for analysis of methylation status of SEQ ID NO: 18
ttttattagttcggttgtcgg

SEQ ID NO: 13246 - DNA, 22 bp, Artificial Sequence
  bisulfite treated nucleic acid for analysis of methylation status of SEQ ID NO: 18
tattctctaaacacgacgccta

SEQ ID NO: 13247 - DNA, 22 bp, Artificial Sequence
  bisulfite treated nucleic acid for analysis of methylation status of SEQ ID NO: 18
tttttattagttcggttgtcgg

SEQ ID NO: 13248 - DNA, 22 bp, Artificial Sequence
  bisulfite treated nucleic acid for analysis of methylation status of SEQ ID NO: 18
gcgtcgtgtttagagaataaga

SEQ ID NO: 13249 - DNA, 23 bp, Artificial Sequence
  bisulfite treated nucleic acid for analysis of methylation status of SEQ ID NO: 18
actatatctttaactcgctcccg

SEQ ID NO: 13250 - DNA, 21 bp, Artificial Sequence
  bisulfite treated nucleic acid for analysis of methylation status of SEQ ID NO: 18
ttttcgcgtttttattagttc

SEQ ID NO: 13251 - DNA, 19 bp, Artificial Sequence
  bisulfite treated nucleic acid for analysis of methylation status of SEQ ID NO: 18
aacacgacgcctatactcc

SEQ ID NO: 13252 - DNA, 16 bp, Artificial Sequence
  bisulfite treated nucleic acid for analysis of methylation status of SEQ ID NO: 18
ttcgcgcgttgggtag

SEQ ID NO: 13253 - DNA, 19 bp, Artificial Sequence
  bisulfite treated nucleic acid for analysis of methylation status of SEQ ID NO: 18
gttgtcggggtatagttat

SEQ ID NO: 13254 - DNA, 21 bp, Artificial Sequence
  bisulfite treated nucleic acid for analysis of methylation status of SEQ ID NO: 18
ataggcgtcgtgtttagagaa

SEQ ID NO: 13255 - DNA, 18 bp, Artificial Sequence
  bisulfite treated nucleic acid for analysis of methylation status of SEQ ID NO: 18
atctttaactcgctcccg

SEQ ID NO: 13256 - DNA, 22 bp, Artificial Sequence
  bisulfite treated nucleic acid for analysis of methylation status of SEQ ID NO: 18
ggagtataggcgtcgtgtttag

SEQ ID NO: 13257 - DNA, 18 bp, Artificial Sequence
  bisulfite treated nucleic acid for analysis of methylation status of SEQ ID NO: 18
ccgcgcctatctcttatt

SEQ ID NO: 13258 - DNA, 19 bp, Artificial Sequence
  bisulfite treated nucleic acid for analysis of methylation status of SEQ ID NO: 18
ggtttacggcggatagaat

SEQ ID NO: 13259 - DNA, 22 bp, Artificial Sequence
  bisulfite treated nucleic acid for analysis of methylation status of SEQ ID NO: 18
cgacaaccgaactaataaaaac

SEQ ID NO: 13260 - DNA, 17 bp, Artificial Sequence
  bisulfite treated nucleic acid for analysis of methylation status of SEQ ID NO: 18
ttcgagcgtattacggg

SEQ ID NO: 13261 - DNA, 18 bp, Artificial Sequence
  bisulfite treated nucleic acid for analysis of methylation status of SEQ ID NO: 18
gtagggggtttataggta

SEQ ID NO: 13262 - DNA, 22 bp, Artificial Sequence
  bisulfite treated nucleic acid for analysis of methylation status of SEQ ID NO: 18
gacaaccgaactaataaaaacg

SEQ ID NO: 13263 - DNA, 21 bp, Artificial Sequence
  bisulfite treated nucleic acid for analysis of methylation status of SEQ ID NO: 18
taaacacgacgcctatactcc

SEQ ID NO: 13264 - DNA, 22 bp, Artificial Sequence
  bisulfite treated nucleic acid for analysis of methylation status of SEQ ID NO: 18
gcgtttttattagttcggttgt

SEQ ID NO: 13265 - DNA, 18 bp, Artificial Sequence
  nucleic acid for analysis of methylation status of SEQ ID NO: 18
ttagtttcggtttttcgc

SEQ ID NO: 13266 - DNA, 22 bp, Artificial Sequence
  bisulfite treated nucleic acid for analysis of methylation status of SEQ ID NO: 18
ctctaaacacgacgcctatact

SEQ ID NO: 13267 - DNA, 21 bp, Artificial Sequence
  bisulfite treated nucleic acid for analysis of methylation status of SEQ ID NO: 18
ttattctctaaacacgacgcc

SEQ ID NO: 13268 - DNA, 19 bp, Artificial Sequence
  bisulfite treated nucleic acid for analysis of methylation status of SEQ ID NO: 18
ttattagttcggttgtcgg

SEQ ID NO: 13269 - DNA, 22 bp, Artificial Sequence
  bisulfite treated nucleic acid for analysis of methylation status of SEQ ID NO: 18
cgggagcgagttaaagatatag

SEQ ID NO: 13270 - DNA, 19 bp, Artificial Sequence
  bisulfite treated nucleic acid for analysis of methylation status of SEQ ID NO: 18
accgataacgaaaaacgac

SEQ ID NO: 13271 - DNA, 17 bp, Artificial Sequence
  bisulfite treated nucleic acid for analysis of methylation status of SEQ ID NO: 18
ttcgaggcgtcgtacgt

SEQ ID NO: 13272 - DNA, 24 bp, Artificial Sequence
  bisulfite treated nucleic acid for analysis of methylation status of SEQ ID NO: 18
gtcgtttcgcgaagttatattcgt

SEQ ID NO: 13273 - DNA, 20 bp, Artificial Sequence
  bisulfite treated nucleic acid for analysis of methylation status of SEQ ID NO: 18
taggcgtcgtgtttagagaa

SEQ ID NO: 13274 - DNA, 19 bp, Artificial Sequence
  bisulfite treated nucleic acid for analysis of methylation status of SEQ ID NO: 18
tattagttcggttgtcggg

SEQ ID NO: 13275 - DNA, 17 bp, Artificial Sequence
  bisulfite treated nucleic acid for analysis of methylation status of SEQ ID NO: 18
tctttaactcgctcccg

SEQ ID NO: 13276 - DNA, 19 bp, Artificial Sequence
  bisulfite treated nucleic acid for analysis of methylation status of SEQ ID NO: 18
ctctaaacacgacgcctat

SEQ ID NO: 13277 - DNA, 19 bp, Artificial Sequence
  bisulfite treated nucleic acid for analysis of methylation status of SEQ ID NO: 18
cgcgttgggtagttttatt

SEQ ID NO: 13278 - DNA, 21 bp, Artificial Sequence
  bisulfite treated nucleic acid for analysis of methylation status of SEQ ID NO: 18
gtgtttagagaataagagata

SEQ ID NO: 13279 - DNA, 22 bp, Artificial Sequence
  bisulfite treated nucleic acid for analysis of methylation status of SEQ ID NO: 18
ataggcgtcgtgtttagagaat

SEQ ID NO: 13280 - DNA, 20 bp, Artificial Sequence
  bisulfite treated nucleic acid for analysis of methylation status of SEQ ID NO: 18
ttcgcgtttttattagttcg

SEQ ID NO: 13281 - DNA, 22 bp, Artificial Sequence
  bisulfite treated nucleic acid for analysis of methylation status of SEQ ID NO: 18
tatctaaaccgatctatcaccg

SEQ ID NO: 13282 - DNA, 22 bp, Artificial Sequence
  bisulfite treated nucleic acid for analysis of methylation status of SEQ ID NO: 18
tttttatttcgtaggtatcgtt

SEQ ID NO: 13283 - DNA, 16 bp, Artificial Sequence
  bisulfite treated nucleic acid for analysis of methylation status of SEQ ID NO: 18
gtcgtgaatcgtgcgg

SEQ ID NO: 13284 - DNA, 21 bp, Artificial Sequence
  bisulfite treated nucleic acid for analysis of methylation status of SEQ ID NO: 18
atttgggtagggttttcgcgt

SEQ ID NO: 13285 - DNA, 23 bp, Artificial Sequence
  bisulfite treated nucleic acid for analysis of methylation status of SEQ ID NO: 18
atttttatttcgtaggtatcgtt

SEQ ID NO: 13286 - DNA, 21 bp, Artificial Sequence
  bisulfite treated nucleic acid for analysis of methylation status of SEQ ID NO: 18
atctaaaccgatctatcaccg

SEQ ID NO: 13287-13640 - skipped (354 entries)

SEQ ID NO: 13641 - DNA, 22 bp, Artificial Sequence
  bisulfite treated nucleic acid for analysis of methylation status of SEQ ID NO: 32
tataccccactacgaaatacga

SEQ ID NO: 13642 - DNA, 22 bp, Artificial Sequence
  bisulfite treated nucleic acid for analysis of methylation status of SEQ ID NO: 32
tagttatatgtcggttacgtgc

SEQ ID NO: 13643 - DNA, 16 bp, Artificial Sequence
  bisulfite treated nucleic acid for analysis of methylation status of SEQ ID NO: 32
atcggcgggttttcga

SEQ ID NO: 13644 - DNA, 24 bp, Artificial Sequence
  bisulfite treated nucleic acid for analysis of methylation status of SEQ ID NO: 32
agcgttttggttcgtatttagcgg

SEQ ID NO: 13645 - DNA, 20 bp, Artificial Sequence
  bisulfite treated nucleic acid for analysis of methylation status of SEQ ID NO: 32
gaaatacgaatcgaaaaacg

SEQ ID NO: 13646 - DNA, 21 bp, Artificial Sequence
  bisulfite treated nucleic acid for analysis of methylation status of SEQ ID NO: 32
ataccccactacgaaatacga

SEQ ID NO: 13647 - DNA, 23 bp, Artificial Sequence
  bisulfite treated nucleic acid for analysis of methylation status of SEQ ID NO: 32
atagttatatgtcggttacgtgc

SEQ ID NO: 13648 - DNA, 21 bp, Artificial Sequence
  bisulfite treated nucleic acid for analysis of methylation status of SEQ ID NO: 32
agttatatgtcggttacgtgc

SEQ ID NO: 13649 - DNA, 20 bp, Artificial Sequence
  bisulfite treated nucleic acid for analysis of methylation status of SEQ ID NO: 32
taccccactacgaaatacga

SEQ ID NO: 13650 - DNA, 22 bp, Artificial Sequence
  bisulfite treated nucleic acid for analysis of methylation status of SEQ ID NO: 32
ataatccgctaaatacgaacca

SEQ ID NO: 13651 - DNA, 16 bp, Artificial Sequence
  bisulfite treated nucleic acid for analysis of methylation status of SEQ ID NO: 32
gggaatggggagcgtt

SEQ ID NO: 13652 - DNA, 23 bp, Artificial Sequence
  bisulfite treated nucleic acid for analysis of methylation status of SEQ ID NO: 32
ctataccccactacgaaatacga

SEQ ID NO: 13653 - DNA, 21 bp, Artificial Sequence
  bisulfite treated nucleic acid for analysis of methylation status of SEQ ID NO: 32
taatccgctaaatacgaacca

SEQ ID NO: 13654 - DNA, 19 bp, Artificial Sequence
  bisulfite treated nucleic acid for analysis of methylation status of SEQ ID NO: 32
accccactacgaaatacga

SEQ ID NO: 13655 - DNA, 22 bp, Artificial Sequence
  bisulfite treated nucleic acid for analysis of methylation status of SEQ ID NO: 32
tataatccgctaaatacgaacc

SEQ ID NO: 13656 - DNA, 19 bp, Artificial Sequence
  bisulfite treated nucleic acid for analysis of methylation status of SEQ ID NO: 32
tatatgtcggttacgtgcg

SEQ ID NO: 13657 - DNA, 16 bp, Artificial Sequence
  bisulfite treated nucleic acid for analysis of methylation status of SEQ ID NO: 32
ggaatggggagcgttt

SEQ ID NO: 13658 - DNA, 19 bp, Artificial Sequence
  bisulfite treated nucleic acid for analysis of methylation status of SEQ ID NO: 32
atccgctaaatacgaacca

SEQ ID NO: 13659 - DNA, 23 bp, Artificial Sequence
  bisulfite treated nucleic acid for analysis of methylation status of SEQ ID NO: 32
tataatccgctaaatacgaacca

SEQ ID NO: 13660 - DNA, 22 bp, Artificial Sequence
  bisulfite treated nucleic acid for analysis of methylation status of SEQ ID NO: 33
ctaaaaactctacctcgtaccg

SEQ ID NO: 13661 - DNA, 20 bp, Artificial Sequence
  bisulfite treated nucleic acid for analysis of methylation status of SEQ ID NO: 33
tagggtcgatttagtcggag

SEQ ID NO: 13662 - DNA, 20 bp, Artificial Sequence
  bisulfite treated nucleic acid for analysis of methylation status of SEQ ID NO: 33
ttcgcgttgagtatttcgta

SEQ ID NO: 13663 - DNA, 18 bp, Artificial Sequence
  bisulfite treated nucleic acid for analysis of methylation status of SEQ ID NO: 33
atcgatttgcgttaggtt

SEQ ID NO: 13664 - DNA, 22 bp, Artificial Sequence
  bisulfite treated nucleic acid for analysis of methylation status of SEQ ID NO: 34
ttttcggttagtttcgtatttt

SEQ ID NO: 13665 - DNA, 21 bp, Artificial Sequence
  bisulfite treated nucleic acid for analysis of methylation status of SEQ ID NO: 34
aaaattcactacaacgctacg

SEQ ID NO: 13666 - DNA, 19 bp, Artificial Sequence
  bisulfite treated nucleic acid for analysis of methylation status of SEQ ID NO: 34
ttcgtttgggtaacgtcga

SEQ ID NO: 13667 - DNA, 20 bp, Artificial Sequence
  bisulfite treated nucleic acid for analysis of methylation status of SEQ ID NO: 34
ttttcgggttattacgtttt

SEQ ID NO: 13668 - DNA, 22 bp, Artificial Sequence
  bisulfite treated nucleic acid for analysis of methylation status of SEQ ID NO: 34
aaaaattcactacaacgctacg

SEQ ID NO: 13669 - DNA, 22 bp, Artificial Sequence
  bisulfite treated nucleic acid for analysis of methylation status of SEQ ID NO: 34
gattttcggttagtttcgtatt

SEQ ID NO: 13670 - DNA, 22 bp, Artificial Sequence
  bisulfite treated nucleic acid for analysis of methylation status of SEQ ID NO: 34
ttaagattttcggttagtttcg

SEQ ID NO: 13671 - DNA, 22 bp, Artificial Sequence
  bisulfite treated nucleic acid for analysis of methylation status of SEQ ID NO: 34
attttcggttagtttcgtattt

SEQ ID NO: 13672 - DNA, 23 bp, Artificial Sequence
  bisulfite treated nucleic acid for analysis of methylation status of SEQ ID NO: 34
agattttcggttagtttcgtatt

SEQ ID NO: 13673 - DNA, 22 bp, Artificial Sequence
  bisulfite treated nucleic acid for analysis of methylation status of SEQ ID NO: 34
taagattttcggttagtttcgt

SEQ ID NO: 13674 - DNA, 20 bp, Artificial Sequence
  bisulfite treated nucleic acid for analysis of methylation status of SEQ ID NO: 34
aattcactacaacgctacgc

SEQ ID NO: 13675 - DNA, 22 bp, Artificial Sequence
  bisulfite treated nucleic acid for analysis of methylation status of SEQ ID NO: 34
tttcggttagtttcgtattttt

SEQ ID NO: 13676 - DNA, 21 bp, Artificial Sequence
  bisulfite treated nucleic acid for analysis of methylation status of SEQ ID NO: 34
taagattttcggttagtttcg

SEQ ID NO: 13677 - DNA, 20 bp, Artificial Sequence
  bisulfite treated nucleic acid for analysis of methylation status of SEQ ID NO: 34
cgtatttgaatttgtaggcg

SEQ ID NO: 13678 - DNA, 22 bp, Artificial Sequence
  bisulfite treated nucleic acid for analysis of methylation status of SEQ ID NO: 34
acgaaactaaccgaaaatctta

SEQ ID NO: 13679 - DNA, 16 bp, Artificial Sequence
  bisulfite treated nucleic acid for analysis of methylation status of SEQ ID NO: 34
taggcgtgcggacgta

SEQ ID NO: 13680 - DNA, 17 bp, Artificial Sequence
  bisulfite treated nucleic acid for analysis of methylation status of SEQ ID NO: 34
aggtgttgtggatagga

SEQ ID NO: 13681 - DNA, 23 bp, Artificial Sequence
  bisulfite treated nucleic acid for analysis of methylation status of SEQ ID NO: 34
attaagattttcggttagtttcg

SEQ ID NO: 13682 - DNA, 21 bp, Artificial Sequence
  bisulfite treated nucleic acid for analysis of methylation status of SEQ ID NO: 34
aaattcactacaacgctacgc

SEQ ID NO: 13683 - DNA, 22 bp, Artificial Sequence
  bisulfite treated nucleic acid for analysis of methylation status of SEQ ID NO: 34
agattttcggttagtttcgtat

SEQ ID NO: 13684 - DNA, 22 bp, Artificial Sequence
  bisulfite treated nucleic acid for analysis of methylation status of SEQ ID NO: 34
aaaattcactacaacgctacgc

SEQ ID NO: 13685 - DNA, 21 bp, Artificial Sequence
  bisulfite treated nucleic acid for analysis of methylation status of SEQ ID NO: 34
aagattttcggttagtttcgt

SEQ ID NO: 13686 - DNA, 22 bp, Artificial Sequence
  bisulfite treated nucleic acid for analysis of methylation status of SEQ ID NO: 34
atacgaaactaaccgaaaatct

SEQ ID NO: 13687 - DNA, 21 bp, Artificial Sequence
  bisulfite treated nucleic acid for analysis of methylation status of SEQ ID NO: 34
tcgtatttgaatttgtaggcg

SEQ ID NO: 13688 - DNA, 19 bp, Artificial Sequence
  bisulfite treated nucleic acid for analysis of methylation status of SEQ ID NO: 34
attcactacaacgctacgc

SEQ ID NO: 13689 - DNA, 22 bp, Artificial Sequence
  bisulfite treated nucleic acid for analysis of methylation status of SEQ ID NO: 34
ttcgtatttgaatttgtaggcg

SEQ ID NO: 13690 - DNA, 23 bp, Artificial Sequence
  bisulfite treated nucleic acid for analysis of methylation status of SEQ ID NO: 34
tacgaaactaaccgaaaatctta

SEQ ID NO: 13691 - DNA, 20 bp, Artificial Sequence
  bisulfite treated nucleic acid for analysis of methylation status of SEQ ID NO: 34
aagattttcggttagtttcg

SEQ ID NO: 13692 - DNA, 20 bp, Artificial Sequence
  bisulfite treated nucleic acid for analysis of methylation status of SEQ ID NO: 34
aaattcactacaacgctacg

SEQ ID NO: 13693 - DNA, 23 bp, Artificial Sequence
  bisulfite treated nucleic acid for analysis of methylation status of SEQ ID NO: 34
gattttcggttagtttcgtattt

SEQ ID NO: 13694 - DNA, 18 bp, Artificial Sequence
  bisulfite treated nucleic acid for analysis of methylation status of SEQ ID NO: 34
actacaacgctacgcgac

SEQ ID NO: 13695 - DNA, 21 bp, Artificial Sequence
  bisulfite treated nucleic acid for analysis of methylation status of SEQ ID NO: 34
cgaaactaaccgaaaatctta

SEQ ID NO: 13696 - DNA, 21 bp, Artificial Sequence
  bisulfite treated nucleic acid for analysis of methylation status of SEQ ID NO: 34
ttcggttagtttcgtattttt

SEQ ID NO: 13697 - DNA, 22 bp, Artificial Sequence
  bisulfite treated nucleic acid for analysis of methylation status of SEQ ID NO: 24
tttcgatataggtttcgagttt

SEQ ID NO: 13698 - DNA, 22 bp, Artificial Sequence
  bisulfite treated nucleic acid for analysis of methylation status of SEQ ID NO: 24
aaaataataaaacgctcacgac

SEQ ID NO: 13699 - DNA, 19 bp, Artificial Sequence
  bisulfite treated nucleic acid for analysis of methylation status of SEQ ID NO: 24
gtcgaacgcgttttttcgg

SEQ ID NO: 13700 - DNA, 17 bp, Artificial Sequence
  bisulfite treated nucleic acid for analysis of methylation status of SEQ ID NO: 24
ttgagttaatcggcgtg

SEQ ID NO: 13701 - DNA, 22 bp, Artificial Sequence
  bisulfite treated nucleic acid for analysis of methylation status of SEQ ID NO: 24
ttttcgatataggtttcgagtt

SEQ ID NO: 13702 - DNA, 22 bp, Artificial Sequence
  bisulfite treated nucleic acid for analysis of methylation status of SEQ ID NO: 24
ttcgatataggtttcgagtttt

SEQ ID NO: 13703 - DNA, 22 bp, Artificial Sequence
  bisulfite treated nucleic acid for analysis of methylation status of SEQ ID NO: 24
tttttcgatataggtttcgagt

SEQ ID NO: 13704 - DNA, 22 bp, Artificial Sequence
  bisulfite treated nucleic acid for analysis of methylation status of SEQ ID NO: 24
aaaaataataaaacgctcacga

SEQ ID NO: 13705 - DNA, 21 bp, Artificial Sequence
  bisulfite treated nucleic acid for analysis of methylation status of SEQ ID NO: 24
aaaaataataaaacgctcacg

SEQ ID NO: 13706 - DNA, 21 bp, Artificial Sequence
  bisulfite treated nucleic acid for analysis of methylation status of SEQ ID NO: 24
aaataataaaacgctcacgac

SEQ ID NO: 13707 - DNA, 21 bp, Artificial Sequence
  bisulfite treated nucleic acid for analysis of methylation status of SEQ ID NO: 24
aataataaaacgctcacgacc

SEQ ID NO: 13708 - DNA, 20 bp, Artificial Sequence
  bisulfite treated nucleic acid for analysis of methylation status of SEQ ID NO: 24
ataataaaacgctcacgacc

SEQ ID NO: 13709 - DNA, 20 bp, Artificial Sequence
  bisulfite treated nucleic acid for analysis of methylation status of SEQ ID NO: 24
cgtttttcggagttgttaat

SEQ ID NO: 13710 - DNA, 22 bp, Artificial Sequence
  bisulfite treated nucleic acid for analysis of methylation status of SEQ ID NO: 24
acgtaaaatcacgaactaaacc

SEQ ID NO: 13711 - DNA, 19 bp, Artificial Sequence
  bisulfite treated nucleic acid for analysis of methylation status of SEQ ID NO: 24
gttaacgttatcgttacgt

SEQ ID NO: 13712 - DNA, 19 bp, Artificial Sequence
  bisulfite treated nucleic acid for analysis of methylation status of SEQ ID NO: 24
tatataggtgagttttggg

SEQ ID NO: 13713 - DNA, 21 bp, Artificial Sequence
  bisulfite treated nucleic acid for analysis of methylation status of SEQ ID NO: 24
tcgtttttcggagttgttaat

SEQ ID NO: 13714 - DNA, 22 bp, Artificial Sequence
  bisulfite treated nucleic acid for analysis of methylation status of SEQ ID NO: 24
ttcgtttttcggagttgttaat

SEQ ID NO: 13715 - DNA, 19 bp, Artificial Sequence
  bisulfite treated nucleic acid for analysis of methylation status of SEQ ID NO: 24
tttcgtttttcggagttgt

SEQ ID NO: 13716 - DNA, 19 bp, Artificial Sequence
  bisulfite treated nucleic acid for analysis of methylation status of SEQ ID NO: 24
taataaaacgctcacgacc

SEQ ID NO: 13717 - DNA, 21 bp, Artificial Sequence
  bisulfite treated nucleic acid for analysis of methylation status of SEQ ID NO: 24
cgtaaaatcacgaactaaacc

SEQ ID NO: 13718 - DNA, 21 bp, Artificial Sequence
  bisulfite treated nucleic acid for analysis of methylation status of SEQ ID NO: 24
ataataaaacgctcacgaccc

SEQ ID NO: 13719 - DNA, 21 bp, Artificial Sequence
  bisulfite treated nucleic acid for analysis of methylation status of SEQ ID NO: 24
cgatataggtttcgagttttt

SEQ ID NO: 13720 - DNA, 21 bp, Artificial Sequence
  bisulfite treated nucleic acid for analysis of methylation status of SEQ ID NO: 24
aaaataataaaacgctcacga

SEQ ID NO: 13721 - DNA, 21 bp, Artificial Sequence
  bisulfite treated nucleic acid for analysis of methylation status of SEQ ID NO: 24
tcgatataggtttcgagtttt

SEQ ID NO: 13722 - DNA, 22 bp, Artificial Sequence
  bisulfite treated nucleic acid for analysis of methylation status of SEQ ID NO: 24
tcgatataggtttcgagttttt

SEQ ID NO: 13723 - DNA, 20 bp, Artificial Sequence
  bisulfite treated nucleic acid for analysis of methylation status of SEQ ID NO: 24
aaaataataaaacgctcacg

SEQ ID NO: 13724 - DNA, 22 bp, Artificial Sequence
  bisulfite treated nucleic acid for analysis of methylation status of SEQ ID NO: 24
aataataaaacgctcacgaccc

SEQ ID NO: 13725 - DNA, 20 bp, Artificial Sequence
  bisulfite treated nucleic acid for analysis of methylation status of SEQ ID NO: 24
taataaaacgctcacgaccc

SEQ ID NO: 13726 - DNA, 18 bp, Artificial Sequence
  bisulfite treated nucleic acid for analysis of methylation status of SEQ ID NO: 24
gtcgcgtatggagttttc

SEQ ID NO: 13727 - DNA, 18 bp, Artificial Sequence
  bisulfite treated nucleic acid for analysis of methylation status of SEQ ID NO: 24
ataaaacgctcacgaccc

SEQ ID NO: 13728 - DNA, 19 bp, Artificial Sequence
  bisulfite treated nucleic acid for analysis of methylation status of SEQ ID NO: 24
cgtttacgcggagtttagt

SEQ ID NO: 13729 - DNA, 23 bp, Artificial Sequence
  bisulfite treated nucleic acid for analysis of methylation status of SEQ ID NO: 24
aattaacgaacgaaaaacttcta

SEQ ID NO: 13730 - DNA, 17 bp, Artificial Sequence
  bisulfite treated nucleic acid for analysis of methylation status of SEQ ID NO: 24
ttcgtcggttgttacgt

SEQ ID NO: 13731 - DNA, 24 bp, Artificial Sequence
  bisulfite treated nucleic acid for analysis of methylation status of SEQ ID NO: 24
ttcgttgagtagtatggcgtgcga

SEQ ID NO: 13732 - DNA, 21 bp, Artificial Sequence
  bisulfite treated nucleic acid for analysis of methylation status of SEQ ID NO: 24
cgtatggagttttcgtttttc

SEQ ID NO: 13733 - DNA, 22 bp, Artificial Sequence
  bisulfite treated nucleic acid for analysis of methylation status of SEQ ID NO: 24
cgtaaaatcacgaactaaaccc

SEQ ID NO: 13734 - DNA, 18 bp, Artificial Sequence
  bisulfite treated nucleic acid for analysis of methylation status of SEQ ID NO: 24
aataaaacgctcacgacc

SEQ ID NO: 13735 - DNA, 20 bp, Artificial Sequence
  bisulfite treated nucleic acid for analysis of methylation status of SEQ ID NO: 24
cgggtttacgtgagttgtag

SEQ ID NO: 13736 - DNA, 20 bp, Artificial Sequence
  bisulfite treated nucleic acid for analysis of methylation status of SEQ ID NO: 24
ccgaaacgacgataaaaata

SEQ ID NO: 13737 - DNA, 17 bp, Artificial Sequence
  bisulfite treated nucleic acid for analysis of methylation status of SEQ ID NO: 24
gttgtcgtcgttatcgt

SEQ ID NO: 13738 - DNA, 16 bp, Artificial Sequence
  bisulfite treated nucleic acid for analysis of methylation status of SEQ ID NO: 24
aaacgtaggggcggtt

SEQ ID NO: 13739 - DNA, 17 bp, Artificial Sequence
  bisulfite treated nucleic acid for analysis of methylation status of SEQ ID NO: 24
taaaacgctcacgaccc

SEQ ID NO: 13740 - DNA, 22 bp, Artificial Sequence
  bisulfite treated nucleic acid for analysis of methylation status of SEQ ID NO: 24
tccgctatattctaaattcgtc

SEQ ID NO: 13741 - DNA, 22 bp, Artificial Sequence
  bisulfite treated nucleic acid for analysis of methylation status of SEQ ID NO: 24
atagaaatgggcgtagtagtcg

SEQ ID NO: 13742 - DNA, 16 bp, Artificial Sequence
  bisulfite treated nucleic acid for analysis of methylation status of SEQ ID NO: 24
ggtttcgcgtaggcgg

SEQ ID NO: 13743 - DNA, 20 bp, Artificial Sequence
  bisulfite treated nucleic acid for analysis of methylation status of SEQ ID NO: 24
gataagattatagagttggg

SEQ ID NO: 13744 - DNA, 21 bp, Artificial Sequence
  bisulfite treated nucleic acid for analysis of methylation status of SEQ ID NO: 24
tagaaatgggcgtagtagtcg

SEQ ID NO: 13745 - DNA, 22 bp, Artificial Sequence
  bisulfite treated nucleic acid for analysis of methylation status of SEQ ID NO: 35
tattcgaggttaaataaaaacg

SEQ ID NO: 13746 - DNA, 20 bp, Artificial Sequence
  bisulfite treated nucleic acid for analysis of methylation status of SEQ ID NO: 35
ccaccgactactacgaactc

SEQ ID NO: 13747 - DNA, 17 bp, Artificial Sequence
  bisulfite treated nucleic acid for analysis of methylation status of SEQ ID NO: 35
ttcgaggttttcggcgg

SEQ ID NO: 13748 - DNA, 18 bp, Artificial Sequence
  bisulfite treated nucleic acid for analysis of methylation status of SEQ ID NO: 35
agtgggtttttcgcgcgt

SEQ ID NO: 13749 - DNA, 22 bp, Artificial Sequence
  bisulfite treated nucleic acid for analysis of methylation status of SEQ ID NO: 35
attcgaggttaaataaaaacgg

SEQ ID NO: 13750 - DNA, 17 bp, Artificial Sequence
  bisulfite treated nucleic acid for analysis of methylation status of SEQ ID NO: 35
ggtttttcgcgcgtcgt

SEQ ID NO: 13751 - DNA, 21 bp, Artificial Sequence
  bisulfite treated nucleic acid for analysis of methylation status of SEQ ID NO: 35
ttcgaggttaaataaaaacgg

SEQ ID NO: 13752 - DNA, 20 bp, Artificial Sequence
  bisulfite treated nucleic acid for analysis of methylation status of SEQ ID NO: 35
cgaggttaaataaaaacgga

SEQ ID NO: 13753 - DNA, 20 bp, Artificial Sequence
  bisulfite treated nucleic acid for analysis of methylation status of SEQ ID NO: 35
tcgaggttaaataaaaacgg

SEQ ID NO: 13754 - DNA, 20 bp, Artificial Sequence
  bisulfite treated nucleic acid for analysis of methylation status of SEQ ID NO: 35
gcgttattcgggatatttag

SEQ ID NO: 13755 - DNA, 22 bp, Artificial Sequence
  bisulfite treated nucleic acid for analysis of methylation status of SEQ ID NO: 35
actccgtttttatttaacctcg

SEQ ID NO: 13756 - DNA, 16 bp, Artificial Sequence
  bisulfite treated nucleic acid for analysis of methylation status of SEQ ID NO: 35
ggcggtttttacgcga

SEQ ID NO: 13757 - DNA, 24 bp, Artificial Sequence
  bisulfite treated nucleic acid for analysis of methylation status of SEQ ID NO: 35
gtaaattatgataataggtagtta

SEQ ID NO: 13758 - DNA, 22 bp, Artificial Sequence
  bisulfite treated nucleic acid for analysis of methylation status of SEQ ID NO: 35
caaatacgaaactaccgacaac

SEQ ID NO: 13759 - DNA, 22 bp, Artificial Sequence
  bisulfite treated nucleic acid for analysis of methylation status of SEQ ID NO: 35
gtagcgataattttacgtggat

SEQ ID NO: 13760 - DNA, 20 bp, Artificial Sequence
  bisulfite treated nucleic acid for analysis of methylation status of SEQ ID NO: 35
gttgggaatggttggagtgt

SEQ ID NO: 13761 - DNA, 16 bp, Artificial Sequence
  bisulfite treated nucleic acid for analysis of methylation status of SEQ ID NO: 35
tggaagttttgcgcgg

SEQ ID NO: 13762 - DNA, 21 bp, Artificial Sequence
  bisulfite treated nucleic acid for analysis of methylation status of SEQ ID NO: 35
ctacgcaaatacgaaactacc

SEQ ID NO: 13763 - DNA, 22 bp, Artificial Sequence
  bisulfite treated nucleic acid for analysis of methylation status of SEQ ID NO: 35
agcgataattttacgtggatag

SEQ ID NO: 13764 - DNA, 22 bp, Artificial Sequence
  bisulfite treated nucleic acid for analysis of methylation status of SEQ ID NO: 35
tagcgataattttacgtggata

SEQ ID NO: 13765 - DNA, 21 bp, Artificial Sequence
  bisulfite treated nucleic acid for analysis of methylation status of SEQ ID NO: 35
cctacgcaaatacgaaactac

SEQ ID NO: 13766 - DNA, 21 bp, Artificial Sequence
  bisulfite treated nucleic acid for analysis of methylation status of SEQ ID NO: 35
caaatacgaaactaccgacaa

SEQ ID NO: 13767 - DNA, 22 bp, Artificial Sequence
  bisulfite treated nucleic acid for analysis of methylation status of SEQ ID NO: 35
aaggtagcgataattttacgtg

SEQ ID NO: 13768 - DNA, 20 bp, Artificial Sequence
  bisulfite treated nucleic acid for analysis of methylation status of SEQ ID NO: 35
gcaaatacgaaactaccgac

SEQ ID NO: 13769 - DNA, 22 bp, Artificial Sequence
  bisulfite treated nucleic acid for analysis of methylation status of SEQ ID NO: 35
cgataattttacgtggatagga

SEQ ID NO: 13770 - DNA, 16 bp, Artificial Sequence
  bisulfite treated nucleic acid for analysis of methylation status of SEQ ID NO: 35
ggaagttttgcgcgga

SEQ ID NO: 13771 - DNA, 19 bp, Artificial Sequence
  bisulfite treated nucleic acid for analysis of methylation status of SEQ ID NO: 35
ggataggatggaagttttg

SEQ ID NO: 13772 - DNA, 21 bp, Artificial Sequence
  bisulfite treated nucleic acid for analysis of methylation status of SEQ ID NO: 35
aaatacgaaactaccgacaac

SEQ ID NO: 13773 - DNA, 20 bp, Artificial Sequence
  bisulfite treated nucleic acid for analysis of methylation status of SEQ ID NO: 35
atacgaaactaccgacaacg

SEQ ID NO: 13774 - DNA, 21 bp, Artificial Sequence
  bisulfite treated nucleic acid for analysis of methylation status of SEQ ID NO: 35
aatacgaaactaccgacaacg

SEQ ID NO: 13775 - DNA, 23 bp, Artificial Sequence
  bisulfite treated nucleic acid for analysis of methylation status of SEQ ID NO: 35
taaggtagcgataattttacgtg

SEQ ID NO: 13776 - DNA, 21 bp, Artificial Sequence
  bisulfite treated nucleic acid for analysis of methylation status of SEQ ID NO: 35
gcgataattttacgtggatag

SEQ ID NO: 13777 - DNA, 22 bp, Artificial Sequence
  bisulfite treated nucleic acid for analysis of methylation status of SEQ ID NO: 35
cctacgcaaatacgaaactacc

SEQ ID NO: 13778 - DNA, 22 bp, Artificial Sequence
  bisulfite treated nucleic acid for analysis of methylation status of SEQ ID NO: 35
ccctacgcaaatacgaaactac

SEQ ID NO: 13779 - DNA, 20 bp, Artificial Sequence
  bisulfite treated nucleic acid for analysis of methylation status of SEQ ID NO: 35
caaacgcgaaaatactaacc

SEQ ID NO: 13780 - DNA, 21 bp, Artificial Sequence
  bisulfite treated nucleic acid for analysis of methylation status of SEQ ID NO: 35
tattaaagtgggatcgtcgta

SEQ ID NO: 13781 - DNA, 30 bp, Artificial Sequence
  bisulfite treated nucleic acid for analysis of methylation status of SEQ ID NO: 35
gaacgcgagtttttaaagtatatacgtatt

SEQ ID NO: 13782 - DNA, 19 bp, Artificial Sequence
  bisulfite treated nucleic acid for analysis of methylation status of SEQ ID NO: 35
agttcgattagtgtttgga

SEQ ID NO: 13783 - DNA, 20 bp, Artificial Sequence
  bisulfite treated nucleic acid for analysis of methylation status of SEQ ID NO: 35
ccaaacgcgaaaatactaac

SEQ ID NO: 13784 - DNA, 21 bp, Artificial Sequence
  bisulfite treated nucleic acid for analysis of methylation status of SEQ ID NO: 35
agcgataattttacgtggata

SEQ ID NO: 13785 - DNA, 19 bp, Artificial Sequence
  bisulfite treated nucleic acid for analysis of methylation status of SEQ ID NO: 35
tacgaaactaccgacaacg

SEQ ID NO: 13786 - DNA, 21 bp, Artificial Sequence
  bisulfite treated nucleic acid for analysis of methylation status of SEQ ID NO: 35
aggtagcgataattttacgtg

SEQ ID NO: 13787 - DNA, 19 bp, Artificial Sequence
  bisulfite treated nucleic acid for analysis of methylation status of SEQ ID NO: 35
tggataggatggaagtttt

SEQ ID NO: 13788 - DNA, 22 bp, Artificial Sequence
  bisulfite treated nucleic acid for analysis of methylation status of SEQ ID NO: 35
ttattaaagtgggatcgtcgta

SEQ ID NO: 13789 - DNA, 21 bp, Artificial Sequence
  bisulfite treated nucleic acid for analysis of methylation status of SEQ ID NO: 35
tagcgataattttacgtggat

SEQ ID NO: 13790 - DNA, 22 bp, Artificial Sequence
  bisulfite treated nucleic acid for analysis of methylation status of SEQ ID NO: 35
aaatacgaaactaccgacaacg

SEQ ID NO: 13791 - DNA, 21 bp, Artificial Sequence
  bisulfite treated nucleic acid for analysis of methylation status of SEQ ID NO: 35
acgacgaaataaataacccct

SEQ ID NO: 13792 - DNA, 22 bp, Artificial Sequence
  bisulfite treated nucleic acid for analysis of methylation status of SEQ ID NO: 35
ttagttgcgcgtttttagtatt

SEQ ID NO: 13793 - DNA, 16 bp, Artificial Sequence
  bisulfite treated nucleic acid for analysis of methylation status of SEQ ID NO: 35
tagcgttcggcgtttt

SEQ ID NO: 13794 - DNA, 19 bp, Artificial Sequence
  bisulfite treated nucleic acid for analysis of methylation status of SEQ ID NO: 35
ggagtttcgcgtatttttt

SEQ ID NO: 13795 - DNA, 21 bp, Artificial Sequence
  bisulfite treated nucleic acid for analysis of methylation status of SEQ ID NO: 35
ggtagcgataattttacgtgg

SEQ ID NO: 13796 - DNA, 22 bp, Artificial Sequence
  bisulfite treated nucleic acid for analysis of methylation status of SEQ ID NO: 35
attattaaagtgggatcgtcgt

SEQ ID NO: 13797 - DNA, 21 bp, Artificial Sequence
  bisulfite treated nucleic acid for analysis of methylation status of SEQ ID NO: 35
ataatccaaacgcgaaaatac

SEQ ID NO: 13798 - DNA, 21 bp, Artificial Sequence
  bisulfite treated nucleic acid for analysis of methylation status of SEQ ID NO: 35
ggatcgtcgtagttgaaaagt

SEQ ID NO: 13799 - DNA, 18 bp, Artificial Sequence
  bisulfite treated nucleic acid for analysis of methylation status of SEQ ID NO: 35
agtttaggcgtttgtgat

SEQ ID NO: 13800 - DNA, 21 bp, Artificial Sequence
  bisulfite treated nucleic acid for analysis of methylation status of SEQ ID NO: 35
tagttgcgcgtttttagtatt

SEQ ID NO: 13801 - DNA, 18 bp, Artificial Sequence
  bisulfite treated nucleic acid for analysis of methylation status of SEQ ID NO: 35
agcgttcggcgttttcgg

SEQ ID NO: 13802 - DNA, 20 bp, Artificial Sequence
  bisulfite treated nucleic acid for analysis of methylation status of SEQ ID NO: 35
cgacgaaataaataacccct

SEQ ID NO: 13803 - DNA, 20 bp, Artificial Sequence
  bisulfite treated nucleic acid for analysis of methylation status of SEQ ID NO: 35
tacgcaaatacgaaactacc

SEQ ID NO: 13804 - DNA, 22 bp, Artificial Sequence
  bisulfite treated nucleic acid for analysis of methylation status of SEQ ID NO: 35
attaaagtgggatcgtcgtagt

SEQ ID NO: 13805 - DNA, 20 bp, Artificial Sequence
  bisulfite treated nucleic acid for analysis of methylation status of SEQ ID NO: 35
aaacgcgaaaatactaaccc

SEQ ID NO: 13806 - DNA, 21 bp, Artificial Sequence
  bisulfite treated nucleic acid for analysis of methylation status of SEQ ID NO: 35
tccaaacgcgaaaatactaac

SEQ ID NO: 13807 - DNA, 22 bp, Artificial Sequence
  bisulfite treated nucleic acid for analysis of methylation status of SEQ ID NO: 35
tccctacgcaaatacgaaacta

SEQ ID NO: 13808 - DNA, 21 bp, Artificial Sequence
  bisulfite treated nucleic acid for analysis of methylation status of SEQ ID NO: 35
attaaagtgggatcgtcgtag

SEQ ID NO: 13809 - DNA, 22 bp, Artificial Sequence
  bisulfite treated nucleic acid for analysis of methylation status of SEQ ID NO: 35
aacgacgaaataaataacccct

SEQ ID NO: 13810 - DNA, 16 bp, Artificial Sequence
  nucleic acid for analysis of methylation status of SEQ ID NO: 35
ggcggagtttcgcgta

SEQ ID NO: 13811 - DNA, 17 bp, Artificial Sequence
  bisulfite treated nucleic acid for analysis of methylation status of SEQ ID NO: 35
tttcggaaagtttgggg

SEQ ID NO: 13812 - DNA, 22 bp, Artificial Sequence
  bisulfite treated nucleic acid for analysis of methylation status of SEQ ID NO: 35
aataatccaaacgcgaaaatac

SEQ ID NO: 13813 - DNA, 22 bp, Artificial Sequence
  bisulfite treated nucleic acid for analysis of methylation status of SEQ ID NO: 35
gcgataattttacgtggatagg

SEQ ID NO: 13814 - DNA, 21 bp, Artificial Sequence
  bisulfite treated nucleic acid for analysis of methylation status of SEQ ID NO: 35
tacgcaaatacgaaactaccg

SEQ ID NO: 13815 - DNA, 20 bp, Artificial Sequence
  bisulfite treated nucleic acid for analysis of methylation status of SEQ ID NO: 35
taaagtgggatcgtcgtagt

SEQ ID NO: 13816 - DNA, 22 bp, Artificial Sequence
  bisulfite treated nucleic acid for analysis of methylation status of SEQ ID NO: 35
atccaaacgcgaaaatactaac

SEQ ID NO: 13817 - DNA, 18 bp, Artificial Sequence
  bisulfite treated nucleic acid for analysis of methylation status of SEQ ID NO: 35
ctccctacgcaaatacga

SEQ ID NO: 13818 - DNA, 20 bp, Artificial Sequence
  bisulfite treated nucleic acid for analysis of methylation status of SEQ ID NO: 35
taatccaaacgcgaaaatac

SEQ ID NO: 13819 - DNA, 19 bp, Artificial Sequence
  bisulfite treated nucleic acid for analysis of methylation status of SEQ ID NO: 35
aacgcgaaaatactaaccc

SEQ ID NO: 13820 - DNA, 22 bp, Artificial Sequence
  bisulfite treated nucleic acid for analysis of methylation status of SEQ ID NO: 35
gcaaatacgaaactaccgacaa

SEQ ID NO: 13821 - DNA, 21 bp, Artificial Sequence
  bisulfite treated nucleic acid for analysis of methylation status of SEQ ID NO: 35
ttaaagtgggatcgtcgtagt

SEQ ID NO: 13822 - DNA, 20 bp, Artificial Sequence
  bisulfite treated nucleic acid for analysis of methylation status of SEQ ID NO: 35
ttaaagtgggatcgtcgtag

SEQ ID NO: 13823 - DNA, 18 bp, Artificial Sequence
  bisulfite treated nucleic acid for analysis of methylation status of SEQ ID NO: 35
tccctacgcaaatacgaa

SEQ ID NO: 13824 - DNA, 20 bp, Artificial Sequence
  bisulfite treated nucleic acid for analysis of methylation status of SEQ ID NO: 35
ctaaataatccaaacgcgaa

SEQ ID NO: 13825 - DNA, 19 bp, Artificial Sequence
  bisulfite treated nucleic acid for analysis of methylation status of SEQ ID NO: 35
gaaggattttgggttagta

SEQ ID NO: 13826 - DNA, 18 bp, Artificial Sequence
  bisulfite treated nucleic acid for analysis of methylation status of SEQ ID NO: 35
acgaaactaccgacaacg

SEQ ID NO: 13827 - DNA, 17 bp, Artificial Sequence
  bisulfite treated nucleic acid for analysis of methylation status of SEQ ID NO: 35
gtggataggatggaagt

SEQ ID NO: 13828 - DNA, 22 bp, Artificial Sequence
  bisulfite treated nucleic acid for analysis of methylation status of SEQ ID NO: 35
cgaacgctaaatactaaaaacg

SEQ ID NO: 13829 - DNA, 22 bp, Artificial Sequence
  bisulfite treated nucleic acid for analysis of methylation status of SEQ ID NO: 35
tagggtagagagtatcgttgcg

SEQ ID NO: 13830 - DNA, 22 bp, Artificial Sequence
  bisulfite treated nucleic acid for analysis of methylation status of SEQ ID NO: 35
gacgtaggcgtttacgtatcgt

SEQ ID NO: 13831 - DNA, 23 bp, Artificial Sequence
  bisulfite treated nucleic acid for analysis of methylation status of SEQ ID NO: 35
ttcgggtttttaggcgtggggta

SEQ ID NO: 13832 - DNA, 22 bp, Artificial Sequence
  bisulfite treated nucleic acid for analysis of methylation status of SEQ ID NO: 36
ttcgtaagtttaggttttcgtt

SEQ ID NO: 13833 - DNA, 23 bp, Artificial Sequence
  bisulfite treated nucleic acid for analysis of methylation status of SEQ ID NO: 36
ctataacctcgataaaactcgaa

SEQ ID NO: 13834 - DNA, 24 bp, Artificial Sequence
  bisulfite treated nucleic acid for analysis of methylation status of SEQ ID NO: 36
gtcgttggtattcgtgatttacga

SEQ ID NO: 13835 - DNA, 23 bp, Artificial Sequence
  bisulfite treated nucleic acid for analysis of methylation status of SEQ ID NO: 36
atcgggtttagtttattttgcgg

SEQ ID NO: 13836 - DNA, 22 bp, Artificial Sequence
  bisulfite treated nucleic acid for analysis of methylation status of SEQ ID NO: 36
tataacctcgataaaactcgaa

SEQ ID NO: 13837 - DNA, 23 bp, Artificial Sequence
  bisulfite treated nucleic acid for analysis of methylation status of SEQ ID NO: 36
cgtagtagttgggtatgtttacg

SEQ ID NO: 13838 - DNA, 22 bp, Artificial Sequence
  bisulfite treated nucleic acid for analysis of methylation status of SEQ ID NO: 36
gcgactaataaataacctcgat

SEQ ID NO: 13839 - DNA, 21 bp, Artificial Sequence
  bisulfite treated nucleic acid for analysis of methylation status of SEQ ID NO: 36
tacgtttatttatcgtatcga

SEQ ID NO: 13840 - DNA, 16 bp, Artificial Sequence
  bisulfite treated nucleic acid for analysis of methylation status of SEQ ID NO: 36
ggcgagttgatgtcgg

SEQ ID NO: 13841 - DNA, 23 bp, Artificial Sequence
  bisulfite treated nucleic acid for analysis of methylation status of SEQ ID NO: 36
tcgtaagtttaggttttcgttta

SEQ ID NO: 13842 - DNA, 16 bp, Artificial Sequence
  bisulfite treated nucleic acid for analysis of methylation status of SEQ ID NO: 36
tgcggtcgtttaggga

SEQ ID NO: 13843 - DNA, 21 bp, Artificial Sequence
  bisulfite treated nucleic acid for analysis of methylation status of SEQ ID NO: 36
ataacctcgataaaactcgaa

SEQ ID NO: 13844 - DNA, 22 bp, Artificial Sequence
  bisulfite treated nucleic acid for analysis of methylation status of SEQ ID NO: 36
cgtaagtttaggttttcgttta

SEQ ID NO: 13845 - DNA, 23 bp, Artificial Sequence
  bisulfite treated nucleic acid for analysis of methylation status of SEQ ID NO: 36
gttcgtaagtttaggttttcgtt

SEQ ID NO: 13846 - DNA, 19 bp, Artificial Sequence
  bisulfite treated nucleic acid for analysis of methylation status of SEQ ID NO: 36
ttagtttattttgcggtcg

SEQ ID NO: 13847 - DNA, 22 bp, Artificial Sequence
  bisulfite treated nucleic acid for analysis of methylation status of SEQ ID NO: 36
aaaacgaaaccacgactataac

SEQ ID NO: 13848 - DNA, 19 bp, Artificial Sequence
  bisulfite treated nucleic acid for analysis of methylation status of SEQ ID NO: 36
tttcgagttttatcgaggt

SEQ ID NO: 13849 - DNA, 19 bp, Artificial Sequence
  bisulfite treated nucleic acid for analysis of methylation status of SEQ ID NO: 36
tttcgaggacgaagttgat

SEQ ID NO: 13850 - DNA, 22 bp, Artificial Sequence
  bisulfite treated nucleic acid for analysis of methylation status of SEQ ID NO: 36
gatacaaaatctacgaaccgac

SEQ ID NO: 13851 - DNA, 20 bp, Artificial Sequence
  bisulfite treated nucleic acid for analysis of methylation status of SEQ ID NO: 36
ttcggattttcggtgttcgt

SEQ ID NO: 13852 - DNA, 17 bp, Artificial Sequence
  bisulfite treated nucleic acid for analysis of methylation status of SEQ ID NO: 36
tggaattcgcgtttgag

SEQ ID NO: 13853 - DNA, 20 bp, Artificial Sequence
  bisulfite treated nucleic acid for analysis of methylation status of SEQ ID NO: 36
taacctcgataaaactcgaa

SEQ ID NO: 13854 - DNA, 19 bp, Artificial Sequence
  bisulfite treated nucleic acid for analysis of methylation status of SEQ ID NO: 36
gttttcgaggacgaagttg

SEQ ID NO: 13855 - DNA, 18 bp, Artificial Sequence
  bisulfite treated nucleic acid for analysis of methylation status of SEQ ID NO: 36
ggttttcgaggacgaagt

SEQ ID NO: 13856 - DNA, 18 bp, Artificial Sequence
  bisulfite treated nucleic acid for analysis of methylation status of SEQ ID NO: 36
ttttcgaggacgaagttg

SEQ ID NO: 13857 - DNA, 20 bp, Artificial Sequence
  bisulfite treated nucleic acid for analysis of methylation status of SEQ ID NO: 36
taacacccgtaacctacgac

SEQ ID NO: 13858 - DNA, 20 bp, Artificial Sequence
  bisulfite treated nucleic acid for analysis of methylation status of SEQ ID NO: 36
tatagcgcgtttattggttt

SEQ ID NO: 13859 - DNA, 16 bp, Artificial Sequence
  bisulfite treated nucleic acid for analysis of methylation status of SEQ ID NO: 36
gacgttcgttacgggt

SEQ ID NO: 13860 - DNA, 16 bp, Artificial Sequence
  bisulfite treated nucleic acid for analysis of methylation status of SEQ ID NO: 36
ggaagtaggtatgggg

SEQ ID NO: 13861 - DNA, 22 bp, Artificial Sequence
  bisulfite treated nucleic acid for analysis of methylation status of SEQ ID NO: 36
actcaaaactaacgacgaaact

SEQ ID NO: 13862 - DNA, 18 bp, Artificial Sequence
  bisulfite treated nucleic acid for analysis of methylation status of SEQ ID NO: 36
gatttcggtggagtcgat

SEQ ID NO: 13863 - DNA, 23 bp, Artificial Sequence
  bisulfite treated nucleic acid for analysis of methylation status of SEQ ID NO: 36
atcgatattagttcgtttttcgt

SEQ ID NO: 13864 - DNA, 21 bp, Artificial Sequence
  bisulfite treated nucleic acid for analysis of methylation status of SEQ ID NO: 36
atttttatgttggatttaggg

SEQ ID NO: 13865 - DNA, 19 bp, Artificial Sequence
  bisulfite treated nucleic acid for analysis of methylation status of SEQ ID NO: 36
cgaatcccactaaaactcg

SEQ ID NO: 13866 - DNA, 21 bp, Artificial Sequence
  bisulfite treated nucleic acid for analysis of methylation status of SEQ ID NO: 36
ttatacgttagtttcggttgc

SEQ ID NO: 13867 - DNA, 16 bp, Artificial Sequence
  bisulfite treated nucleic acid for analysis of methylation status of SEQ ID NO: 36
gtttgcggatcggcgg

SEQ ID NO: 13868 - DNA, 18 bp, Artificial Sequence
  bisulfite treated nucleic acid for analysis of methylation status of SEQ ID NO: 36
atcgggggttcgggacgg

SEQ ID NO: 13869 - DNA, 21 bp, Artificial Sequence
  bisulfite treated nucleic acid for analysis of methylation status of SEQ ID NO: 36
ttaacacccgtaacctacgac

SEQ ID NO: 13870 - DNA, 22 bp, Artificial Sequence
  bisulfite treated nucleic acid for analysis of methylation status of SEQ ID NO: 36
tttatacgttagtttcggttgc

SEQ ID NO: 13871 - DNA, 23 bp, Artificial Sequence
  bisulfite treated nucleic acid for analysis of methylation status of SEQ ID NO: 36
cgtttactcctaaaacaaacgat

SEQ ID NO: 13872 - DNA, 20 bp, Artificial Sequence
  bisulfite treated nucleic acid for analysis of methylation status of SEQ ID NO: 36
tattttataggtcgggttcg

SEQ ID NO: 13873 - DNA, 16 bp, Artificial Sequence
  bisulfite treated nucleic acid for analysis of methylation status of SEQ ID NO: 36
ttcggcgacgtttcgg

SEQ ID NO: 13874 - DNA, 21 bp, Artificial Sequence
  bisulfite treated nucleic acid for analysis of methylation status of SEQ ID NO: 36
gggatttttatatttggagag

SEQ ID NO: 13875 - DNA, 19 bp, Artificial Sequence
  bisulfite treated nucleic acid for analysis of methylation status of SEQ ID NO: 36
acgaccaccttaaaaatcg

SEQ ID NO: 13876 - DNA, 22 bp, Artificial Sequence
  bisulfite treated nucleic acid for analysis of methylation status of SEQ ID NO: 36
cggttaatagtttcgtttaggg

SEQ ID NO: 13877 - DNA, 16 bp, Artificial Sequence
  bisulfite treated nucleic acid for analysis of methylation status of SEQ ID NO: 36
tgttcggcgttcgcga

SEQ ID NO: 13878 - DNA, 17 bp, Artificial Sequence
  bisulfite treated nucleic acid for analysis of methylation status of SEQ ID NO: 36
attgggcgtttttcgag

SEQ ID NO: 13879 - DNA, 19 bp, Artificial Sequence
  bisulfite treated nucleic acid for analysis of methylation status of SEQ ID NO: 36
cgacgaccaccttaaaaat

SEQ ID NO: 13880 - DNA, 19 bp, Artificial Sequence
  bisulfite treated nucleic acid for analysis of methylation status of SEQ ID NO: 36
aacacccgtaacctacgac

SEQ ID NO: 13881 - DNA, 19 bp, Artificial Sequence
  bisulfite treated nucleic acid for analysis of methylation status of SEQ ID NO: 36
atagcgcgtttattggttt

SEQ ID NO: 13882 - DNA, 22 bp, Artificial Sequence
  bisulfite treated nucleic acid for analysis of methylation status of SEQ ID NO: 36
gcggttaatagtttcgtttagg

SEQ ID NO: 13883 - DNA, 22 bp, Artificial Sequence
  bisulfite treated nucleic acid for analysis of methylation status of SEQ ID NO: 28
cgttgtttaggtagttttgtcg

SEQ ID NO: 13884 - DNA, 20 bp, Artificial Sequence
  bisulfite treated nucleic acid for analysis of methylation status of SEQ ID NO: 28
taccgtcgtttttcaaatca

SEQ ID NO: 13885 - DNA, 16 bp, Artificial Sequence
  bisulfite treated nucleic acid for analysis of methylation status of SEQ ID NO: 28
ggcgttttcgggacgt

SEQ ID NO: 13886 - DNA, 16 bp, Artificial Sequence
  bisulfite treated nucleic acid for analysis of methylation status of SEQ ID NO: 28
gtcggcgtgggcgatg

SEQ ID NO: 13887 - DNA, 19 bp, Artificial Sequence
  bisulfite treated nucleic acid for analysis of methylation status of SEQ ID NO: 28
ctactaactccacgtcccg

SEQ ID NO: 13888 - DNA, 16 bp, Artificial Sequence
  bisulfite treated nucleic acid for analysis of methylation status of SEQ ID NO: 28
ggagtcgcgagggtgg

SEQ ID NO: 13889 - DNA, 22 bp, Artificial Sequence
  bisulfite treated nucleic acid for analysis of methylation status of SEQ ID NO: 28
aaactaaccgaacaaacgtaat

SEQ ID NO: 13890 - DNA, 22 bp, Artificial Sequence
  bisulfite treated nucleic acid for analysis of methylation status of SEQ ID NO: 28
gtaggtatcgtagtcgtcgttt

SEQ ID NO: 13891 - DNA, 16 bp, Artificial Sequence
  bisulfite treated nucleic acid for analysis of methylation status of SEQ ID NO: 28
gtagtcgtgcgcgttt

SEQ ID NO: 13892 - DNA, 23 bp, Artificial Sequence
  bisulfite treated nucleic acid for analysis of methylation status of SEQ ID NO: 28
agcgtttcgggtttttatcgcgg

SEQ ID NO: 13893 - DNA, 22 bp, Artificial Sequence
  bisulfite treated nucleic acid for analysis of methylation status of SEQ ID NO: 28
taggtatcgtagtcgtcgtttc

SEQ ID NO: 13894 - DNA, 21 bp, Artificial Sequence
  bisulfite treated nucleic acid for analysis of methylation status of SEQ ID NO: 28
atctcctactctacgtcctcg

SEQ ID NO: 13895 - DNA, 22 bp, Artificial Sequence
  bisulfite treated nucleic acid for analysis of methylation status of SEQ ID NO: 28
attacgtttgttcggttagttt

SEQ ID NO: 13896 - DNA, 21 bp, Artificial Sequence
  bisulfite treated nucleic acid for analysis of methylation status of SEQ ID NO: 28
tgtgagggatttgggttgtgg

SEQ ID NO: 13897 - DNA, 16 bp, Artificial Sequence
  bisulfite treated nucleic acid for analysis of methylation status of SEQ ID NO: 28
ttcgggatggtagcgg

SEQ ID NO: 13898 - DNA, 22 bp, Artificial Sequence
  bisulfite treated nucleic acid for analysis of methylation status of SEQ ID NO: 28
cgtttagtttttatcgcgtatt

SEQ ID NO: 13899 - DNA, 26 bp, Artificial Sequence
  bisulfite treated nucleic acid for analysis of methylation status of SEQ ID NO: 28
ttcggttagttttcgggagttcgttg

SEQ ID NO: 13900 - DNA, 21 bp, Artificial Sequence
  bisulfite treated nucleic acid for analysis of methylation status of SEQ ID NO: 28
gtgggtaggtatcgtagtcgt

SEQ ID NO: 13901 - DNA, 18 bp, Artificial Sequence
  bisulfite treated nucleic acid for analysis of methylation status of SEQ ID NO: 28
ttcgtttgtttacggcgt

SEQ ID NO: 13902 - DNA, 22 bp, Artificial Sequence
  bisulfite treated nucleic acid for analysis of methylation status of SEQ ID NO: 28
aatctcctactctacgtcctcg

SEQ ID NO: 13903 - DNA, 22 bp, Artificial Sequence
  bisulfite treated nucleic acid for analysis of methylation status of SEQ ID NO: 28
aaaactaaccgaacaaacgtaa

SEQ ID NO: 13904 - DNA, 22 bp, Artificial Sequence
  bisulfite treated nucleic acid for analysis of methylation status of SEQ ID NO: 28
ttacgtttgttcggttagtttt

SEQ ID NO: 13905 - DNA, 21 bp, Artificial Sequence
  nucleic acid for analysis of methylation status of SEQ ID NO: 28
aggtatcgtagtcgtcgtttc

SEQ ID NO: 13906 - DNA, 23 bp, Artificial Sequence
  bisulfite treated nucleic acid for analysis of methylation status of SEQ ID NO: 28
tattacgtttgttcggttagttt

SEQ ID NO: 13907 - DNA, 20 bp, Artificial Sequence
  bisulfite treated nucleic acid for analysis of methylation status of SEQ ID NO: 28
ggtatcgtagtcgtcgtttc

SEQ ID NO: 13908 - DNA, 22 bp, Artificial Sequence
  bisulfite treated nucleic acid for analysis of methylation status of SEQ ID NO: 28
tacgtttgttcggttagttttc

SEQ ID NO: 13909 - DNA, 20 bp, Artificial Sequence
  bisulfite treated nucleic acid for analysis of methylation status of SEQ ID NO: 28
tgggtaggtatcgtagtcgt

SEQ ID NO: 13910 - DNA, 20 bp, Artificial Sequence
  bisulfite treated nucleic acid for analysis of methylation status of SEQ ID NO: 28
tctcctactctacgtcctcg

SEQ ID NO: 13911 - DNA, 23 bp, Artificial Sequence
  bisulfite treated nucleic acid for analysis of methylation status of SEQ ID NO: 28
aaaactaaccgaacaaacgtaat

SEQ ID NO: 13912 - DNA, 22 bp, Artificial Sequence
  bisulfite treated nucleic acid for analysis of methylation status of SEQ ID NO: 28
ggtaggtatcgtagtcgtcgtt

SEQ ID NO: 13913 - DNA, 23 bp, Artificial Sequence
  bisulfite treated nucleic acid for analysis of methylation status of SEQ ID NO: 28
gtattacgtttgttcggttagtt

SEQ ID NO: 13914 - DNA, 21 bp, Artificial Sequence
  bisulfite treated nucleic acid for analysis of methylation status of SEQ ID NO: 28
aactaaccgaacaaacgtaat

SEQ ID NO: 13915 - DNA, 22 bp, Artificial Sequence
  bisulfite treated nucleic acid for analysis of methylation status of SEQ ID NO: 28
gaaaactaaccgaacaaacgta

SEQ ID NO: 13916 - DNA, 22 bp, Artificial Sequence
  bisulfite treated nucleic acid for analysis of methylation status of SEQ ID NO: 28
aatacgcgataaaaactaaacg

SEQ ID NO: 13917 - DNA, 20 bp, Artificial Sequence
  bisulfite treated nucleic acid for analysis of methylation status of SEQ ID NO: 28
gtgggtaggtatcgtagtcg

SEQ ID NO: 13918 - DNA, 24 bp, Artificial Sequence
  bisulfite treated nucleic acid for analysis of methylation status of SEQ ID NO: 28
tacgtttgttcggttagttttcgg

SEQ ID NO: 13919 - DNA, 22 bp, Artificial Sequence
  bisulfite treated nucleic acid for analysis of methylation status of SEQ ID NO: 28
agcggttttgcgagggattcgg

SEQ ID NO: 13920 - DNA, 21 bp, Artificial Sequence
  bisulfite treated nucleic acid for analysis of methylation status of SEQ ID NO: 28
acgtttgttcggttagttttc

SEQ ID NO: 13921 - DNA, 20 bp, Artificial Sequence
  bisulfite treated nucleic acid for analysis of methylation status of SEQ ID NO: 28
cgtttgttcggttagttttc

SEQ ID NO: 13922 - DNA, 20 bp, Artificial Sequence
  bisulfite treated nucleic acid for analysis of methylation status of SEQ ID NO: 28
gtttgttcggttagttttcg

SEQ ID NO: 13923 - DNA, 21 bp, Artificial Sequence
  bisulfite treated nucleic acid for analysis of methylation status of SEQ ID NO: 28
tgggtaggtatcgtagtcgtc

SEQ ID NO: 13924 - DNA, 20 bp, Artificial Sequence
  bisulfite treated nucleic acid for analysis of methylation status of SEQ ID NO: 28
gggtaggtatcgtagtcgtc

SEQ ID NO: 13925 - DNA, 20 bp, Artificial Sequence
  bisulfite treated nucleic acid for analysis of methylation status of SEQ ID NO: 28
gtgcgcgtttagtttttatc

SEQ ID NO: 13926 - DNA, 19 bp, Artificial Sequence
  nucleic acid for analysis of methylation status of SEQ ID NO: 28
cggtgggtaggtatcgtag

SEQ ID NO: 13927 - DNA, 16 bp, Artificial Sequence
  bisulfite treated nucleic acid for analysis of methylation status of SEQ ID NO: 28
ttttacgcgcggtagt

SEQ ID NO: 13928 - DNA, 20 bp, Artificial Sequence
  bisulfite treated nucleic acid for analysis of methylation status of SEQ ID NO: 28
gataaaaactaaacgcgcac

SEQ ID NO: 13929 - DNA, 20 bp, Artificial Sequence
  bisulfite treated nucleic acid for analysis of methylation status of SEQ ID NO: 28
cctactctacgtcctcgacc

SEQ ID NO: 13930 - DNA, 23 bp, Artificial Sequence
  bisulfite treated nucleic acid for analysis of methylation status of SEQ ID NO: 28
taatacgcgataaaaactaaacg

SEQ ID NO: 13931 - DNA, 19 bp, Artificial Sequence
  bisulfite treated nucleic acid for analysis of methylation status of SEQ ID NO: 28
aaacaaactccgaacgaaa

SEQ ID NO: 13932 - DNA, 22 bp, Artificial Sequence
  bisulfite treated nucleic acid for analysis of methylation status of SEQ ID NO: 28
gatagagtattcggtttatcgg

SEQ ID NO: 13933 - DNA, 17 bp, Artificial Sequence
  bisulfite treated nucleic acid for analysis of methylation status of SEQ ID NO: 28
aggttttgggggtgtgg

SEQ ID NO: 13934 - DNA, 16 bp, Artificial Sequence
  bisulfite treated nucleic acid for analysis of methylation status of SEQ ID NO: 28
atgggggtaggaagtg

SEQ ID NO: 13935 - DNA, 19 bp, Artificial Sequence
  bisulfite treated nucleic acid for analysis of methylation status of SEQ ID NO: 28
aaaaacaaactccgaacga

SEQ ID NO: 13936 - DNA, 19 bp, Artificial Sequence
  bisulfite treated nucleic acid for analysis of methylation status of SEQ ID NO: 28
aaaacaaactccgaacgaa

SEQ ID NO: 13937 - DNA, 21 bp, Artificial Sequence
  bisulfite treated nucleic acid for analysis of methylation status of SEQ ID NO: 28
atacgcgataaaaactaaacg

SEQ ID NO: 13938 - DNA, 18 bp, Artificial Sequence
  bisulfite treated nucleic acid for analysis of methylation status of SEQ ID NO: 28
agcgtttcgggtttttat

SEQ ID NO: 13939 - DNA, 16 bp, Artificial Sequence
  bisulfite treated nucleic acid for analysis of methylation status of SEQ ID NO: 28
agtcgtgcgcgtttag

SEQ ID NO: 13940 - DNA, 25 bp, Artificial Sequence
  bisulfite treated nucleic acid for analysis of methylation status of SEQ ID NO: 28
agggtagtgttttttttacgcgcgg

SEQ ID NO: 13941 - DNA, 19 bp, Artificial Sequence
  bisulfite treated nucleic acid for analysis of methylation status of SEQ ID NO: 28
tagttttcgggagttcgtt

SEQ ID NO: 13942 - DNA, 19 bp, Artificial Sequence
  bisulfite treated nucleic acid for analysis of methylation status of SEQ ID NO: 28
gttagttttcgggagttcg

SEQ ID NO: 13943 - DNA, 22 bp, Artificial Sequence
  bisulfite treated nucleic acid for analysis of methylation status of SEQ ID NO: 28
ggtgggtaggtatcgtagtcgt

SEQ ID NO: 13944 - DNA, 19 bp, Artificial Sequence
  bisulfite treated nucleic acid for analysis of methylation status of SEQ ID NO: 28
acaaactccgaacgaaaac

SEQ ID NO: 13945 - DNA, 21 bp, Artificial Sequence
  bisulfite treated nucleic acid for analysis of methylation status of SEQ ID NO: 28
cgaggacgtagagtaggagat

SEQ ID NO: 13946 - DNA, 19 bp, Artificial Sequence
  bisulfite treated nucleic acid for analysis of methylation status of SEQ ID NO: 28
tcggtgggtaggtatcgta

SEQ ID NO: 13947 - DNA, 23 bp, Artificial Sequence
  bisulfite treated nucleic acid for analysis of methylation status of SEQ ID NO: 28
gaaaactaaccgaacaaacgtaa

SEQ ID NO: 13948 - DNA, 22 bp, Artificial Sequence
  bisulfite treated nucleic acid for analysis of methylation status of SEQ ID NO: 28
gtaatacgcgataaaaactaaa

SEQ ID NO: 13949 - DNA, 20 bp, Artificial Sequence
  bisulfite treated nucleic acid for analysis of methylation status of SEQ ID NO: 28
ttagttttcgggagttcgtt

SEQ ID NO: 13950 - DNA, 19 bp, Artificial Sequence
  bisulfite treated nucleic acid for analysis of methylation status of SEQ ID NO: 28
atcttctcccgataaaccg

SEQ ID NO: 13951 - DNA, 17 bp, Artificial Sequence
  bisulfite treated nucleic acid for analysis of methylation status of SEQ ID NO: 28
attcgggtcgcggtcga

SEQ ID NO: 13952 - DNA, 19 bp, Artificial Sequence
  bisulfite treated nucleic acid for analysis of methylation status of SEQ ID NO: 28
tagagtaggagattgatag

SEQ ID NO: 13953 - DNA, 18 bp, Artificial Sequence
  bisulfite treated nucleic acid for analysis of methylation status of SEQ ID NO: 28
gcgtttcgggtttttatc

SEQ ID NO: 13954 - DNA, 18 bp, Artificial Sequence
  bisulfite treated nucleic acid for analysis of methylation status of SEQ ID NO: 28
gtttcgggtttttatcgc

SEQ ID NO: 13955 - DNA, 18 bp, Artificial Sequence
  bisulfite treated nucleic acid for analysis of methylation status of SEQ ID NO: 28
gtgcgcgtttagttttta

SEQ ID NO: 13956 - DNA, 19 bp, Artificial Sequence
  bisulfite treated nucleic acid for analysis of methylation status of SEQ ID NO: 28
tgcgcgtttagtttttatc

SEQ ID NO: 13957 - DNA, 22 bp, Artificial Sequence
  bisulfite treated nucleic acid for analysis of methylation status of SEQ ID NO: 28
tgatagagtattcggtttatcg

SEQ ID NO: 13958 - DNA, 19 bp, Artificial Sequence
  bisulfite treated nucleic acid for analysis of methylation status of SEQ ID NO: 28
gagcgtttcgggtttttat

SEQ ID NO: 13959 - DNA, 21 bp, Artificial Sequence
  bisulfite treated nucleic acid for analysis of methylation status of SEQ ID NO: 28
gtcgaggacgtagagtaggag

SEQ ID NO: 13960 - DNA, 19 bp, Artificial Sequence
  bisulfite treated nucleic acid for analysis of methylation status of SEQ ID NO: 28
tactctacgtcctcgaccg

SEQ ID NO: 13961 - DNA, 21 bp, Artificial Sequence
  bisulfite treated nucleic acid for analysis of methylation status of SEQ ID NO: 28
tacgcgataaaaactaaacgc

SEQ ID NO: 13962 - DNA, 18 bp, Artificial Sequence
  bisulfite treated nucleic acid for analysis of methylation status of SEQ ID NO: 28
aacaaactccgaacgaaa

SEQ ID NO: 13963 - DNA, 21 bp, Artificial Sequence
  bisulfite treated nucleic acid for analysis of methylation status of SEQ ID NO: 28
ggtgggtaggtatcgtagtcg

SEQ ID NO: 13964 - DNA, 20 bp, Artificial Sequence
  bisulfite treated nucleic acid for analysis of methylation status of SEQ ID NO: 28
aacaaactccgaacgaaaac

SEQ ID NO: 13965 - DNA, 24 bp, Artificial Sequence
  bisulfite treated nucleic acid for analysis of methylation status of SEQ ID NO: 28
gaaaactaaccgaacaaacgtaat

SEQ ID NO: 13966 - DNA, 20 bp, Artificial Sequence
  bisulfite treated nucleic acid for analysis of methylation status of SEQ ID NO: 28
ctactctacgtcctcgaccg

SEQ ID NO: 13967 - DNA, 19 bp, Artificial Sequence
  bisulfite treated nucleic acid for analysis of methylation status of SEQ ID NO: 28
tttgttcggttagttttcg

SEQ ID NO: 13968 - DNA, 20 bp, Artificial Sequence
  bisulfite treated nucleic acid for analysis of methylation status of SEQ ID NO: 28
aatcttctcccgataaaccg

SEQ ID NO: 13969 - DNA, 22 bp, Artificial Sequence
  bisulfite treated nucleic acid for analysis of methylation status of SEQ ID NO: 28
atagagtattcggtttatcggg

SEQ ID NO: 13970 - DNA, 19 bp, Artificial Sequence
  bisulfite treated nucleic acid for analysis of methylation status of SEQ ID NO: 28
aacaaactccgaacgaaaa

SEQ ID NO: 13971 - DNA, 18 bp, Artificial Sequence
  bisulfite treated nucleic acid for analysis of methylation status of SEQ ID NO: 28
tcttctcccgataaaccg

SEQ ID NO: 13972 - DNA, 18 bp, Artificial Sequence
  bisulfite treated nucleic acid for analysis of methylation status of SEQ ID NO: 28
actcccgaaaactaaccg

SEQ ID NO: 13973 - DNA, 18 bp, Artificial Sequence
  bisulfite treated nucleic acid for analysis of methylation status of SEQ ID NO: 28
atcgcgtattacgtttgt

SEQ ID NO: 13974 - DNA, 20 bp, Artificial Sequence
  bisulfite treated nucleic acid for analysis of methylation status of SEQ ID NO: 28
gcgtttagtttttatcgcgt

SEQ ID NO: 13975 - DNA, 22 bp, Artificial Sequence
  bisulfite treated nucleic acid for analysis of methylation status of SEQ ID NO: 28
tcgaggacgtagagtaggagat

SEQ ID NO: 13976 - DNA, 19 bp, Artificial Sequence
  bisulfite treated nucleic acid for analysis of methylation status of SEQ ID NO: 28
ccgaaaactaaccgaacaa

SEQ ID NO: 13977 - DNA, 17 bp, Artificial Sequence
  bisulfite treated nucleic acid for analysis of methylation status of SEQ ID NO: 28
tttcgggtttttatcgc

SEQ ID NO: 13978 - DNA, 20 bp, Artificial Sequence
  bisulfite treated nucleic acid for analysis of methylation status of SEQ ID NO: 28
aaaaacaaactccgaacgaa

SEQ ID NO: 13979 - DNA, 23 bp, Artificial Sequence
  bisulfite treated nucleic acid for analysis of methylation status of SEQ ID NO: 28
tgcgcgtttagtttttatcgcgt

SEQ ID NO: 13980 - DNA, 18 bp, Artificial Sequence
  bisulfite treated nucleic acid for analysis of methylation status of SEQ ID NO: 28
agttttcgggagttcgtt

SEQ ID NO: 13981 - DNA, 22 bp, Artificial Sequence
  bisulfite treated nucleic acid for analysis of methylation status of SEQ ID NO: 37
ataacgaacaacgaaatctacc

SEQ ID NO: 13982 - DNA, 22 bp, Artificial Sequence
  bisulfite treated nucleic acid for analysis of methylation status of SEQ ID NO: 37
ttatttattcgatttttgaacg

SEQ ID NO: 13983 - DNA, 18 bp, Artificial Sequence
  bisulfite treated nucleic acid for analysis of methylation status of SEQ ID NO: 37
tacgcgtttataggacga

SEQ ID NO: 13984 - DNA, 20 bp, Artificial Sequence
  bisulfite treated nucleic acid for analysis of methylation status of SEQ ID NO: 37
ggttataggtttttgagtag

SEQ ID NO: 13985 - DNA, 22 bp, Artificial Sequence
  bisulfite treated nucleic acid for analysis of methylation status of SEQ ID NO: 37
atttattcgatttttgaacgtg

SEQ ID NO: 13986 - DNA, 23 bp, Artificial Sequence
  bisulfite treated nucleic acid for analysis of methylation status of SEQ ID NO: 37
attatttattcgatttttgaacg

SEQ ID NO: 13987 - DNA, 21 bp, Artificial Sequence
  bisulfite treated nucleic acid for analysis of methylation status of SEQ ID NO: 37
tttattcgatttttgaacgtg

SEQ ID NO: 13988 - DNA, 23 bp, Artificial Sequence
  bisulfite treated nucleic acid for analysis of methylation status of SEQ ID NO: 37
tataacgaacaacgaaatctacc

SEQ ID NO: 13989 - DNA, 21 bp, Artificial Sequence
  bisulfite treated nucleic acid for analysis of methylation status of SEQ ID NO: 37
taacgaacaacgaaatctacc

SEQ ID NO: 13990 - DNA, 22 bp, Artificial Sequence
  bisulfite treated nucleic acid for analysis of methylation status of SEQ ID NO: 37
acgaacaacgaaatctaccata

SEQ ID NO: 13991 - DNA, 23 bp, Artificial Sequence
  bisulfite treated nucleic acid for analysis of methylation status of SEQ ID NO: 37
tatttattcgatttttgaacgtg

SEQ ID NO: 13992 - DNA, 21 bp, Artificial Sequence
  bisulfite treated nucleic acid for analysis of methylation status of SEQ ID NO: 37
cgaacaacgaaatctaccata

SEQ ID NO: 13993 - DNA, 20 bp, Artificial Sequence
  bisulfite treated nucleic acid for analysis of methylation status of SEQ ID NO: 37
ttattcgatttttgaacgtg

SEQ ID NO: 13994 - DNA, 20 bp, Artificial Sequence
  bisulfite treated nucleic acid for analysis of methylation status of SEQ ID NO: 37
aacgaacaacgaaatctacc

SEQ ID NO: 13995 - DNA, 19 bp, Artificial Sequence
  bisulfite treated nucleic acid for analysis of methylation status of SEQ ID NO: 37
ccctcctaactaacgaacg

SEQ ID NO: 13996 - DNA, 22 bp, Artificial Sequence
  bisulfite treated nucleic acid for analysis of methylation status of SEQ ID NO: 37
tagatcgagtttttagcgtagc

SEQ ID NO: 13997 - DNA, 17 bp, Artificial Sequence
  bisulfite treated nucleic acid for analysis of methylation status of SEQ ID NO: 37
ttcggatttcgcgtcgg

SEQ ID NO: 13998 - DNA, 19 bp, Artificial Sequence
  bisulfite treated nucleic acid for analysis of methylation status of SEQ ID NO: 37
tgcgggttagatgtggcgt

SEQ ID NO: 13999 - DNA, 23 bp, Artificial Sequence
  bisulfite treated nucleic acid for analysis of methylation status of SEQ ID NO: 37
ctataacgaacaacgaaatctac

SEQ ID NO: 14000 - DNA, 21 bp, Artificial Sequence
  bisulfite treated nucleic acid for analysis of methylation status of SEQ ID NO: 37
agatcgagtttttagcgtagc

SEQ ID NO: 14001 - DNA, 22 bp, Artificial Sequence
  bisulfite treated nucleic acid for analysis of methylation status of SEQ ID NO: 37
gttatagatcgagtttttagcg

SEQ ID NO: 14002 - DNA, 23 bp, Artificial Sequence
  bisulfite treated nucleic acid for analysis of methylation status of SEQ ID NO: 37
atagatcgagtttttagcgtagc

SEQ ID NO: 14003 - DNA, 20 bp, Artificial Sequence
  bisulfite treated nucleic acid for analysis of methylation status of SEQ ID NO: 37
gatcgagtttttagcgtagc

SEQ ID NO: 14004 - DNA, 22 bp, Artificial Sequence
  bisulfite treated nucleic acid for analysis of methylation status of SEQ ID NO: 26
atatcggttcggagttagatta

SEQ ID NO: 14005 - DNA, 21 bp, Artificial Sequence
  bisulfite treated nucleic acid for analysis of methylation status of SEQ ID NO: 26
aaaaacccgacatactaaacg

SEQ ID NO: 14006 - DNA, 22 bp, Artificial Sequence
  bisulfite treated nucleic acid for analysis of methylation status of SEQ ID NO: 26
gtcgttattgagagtcgttcgg

SEQ ID NO: 14007 - DNA, 24 bp, Artificial Sequence
  bisulfite treated nucleic acid for analysis of methylation status of SEQ ID NO: 26
gggttttataagtattagattata

SEQ ID NO: 14008 - DNA, 20 bp, Artificial Sequence
  bisulfite treated nucleic acid for analysis of methylation status of SEQ ID NO: 26
aaaacccgacatactaaacg

SEQ ID NO: 14009 - DNA, 20 bp, Artificial Sequence
  bisulfite treated nucleic acid for analysis of methylation status of SEQ ID NO: 26
cgaggagtttagcgttagtg

SEQ ID NO: 14010 - DNA, 22 bp, Artificial Sequence
  bisulfite treated nucleic acid for analysis of methylation status of SEQ ID NO: 26
atcttcgacaaaactaaaaacg

SEQ ID NO: 14011 - DNA, 16 bp, Artificial Sequence
  bisulfite treated nucleic acid for analysis of methylation status of SEQ ID NO: 26
gaaacgtaggcgtcgg

SEQ ID NO: 14012 - DNA, 17 bp, Artificial Sequence
  bisulfite treated nucleic acid for analysis of methylation status of SEQ ID NO: 26
tgggggatagtagggag

SEQ ID NO: 14013 - DNA, 21 bp, Artificial Sequence
  bisulfite treated nucleic acid for analysis of methylation status of SEQ ID NO: 26
tcttcgacaaaactaaaaacg

SEQ ID NO: 14014 - DNA, 20 bp, Artificial Sequence
  bisulfite treated nucleic acid for analysis of methylation status of SEQ ID NO: 26
gttttattgacgcgattttt

SEQ ID NO: 14015 - DNA, 21 bp, Artificial Sequence
  bisulfite treated nucleic acid for analysis of methylation status of SEQ ID NO: 26
aacccgacatactaaacgaat

SEQ ID NO: 14016 - DNA, 18 bp, Artificial Sequence
  bisulfite treated nucleic acid for analysis of methylation status of SEQ ID NO: 26
ggttattatgggtagagg

SEQ ID NO: 14017 - DNA, 21 bp, Artificial Sequence
  bisulfite treated nucleic acid for analysis of methylation status of SEQ ID NO: 26
tatcggttcggagttagatta

SEQ ID NO: 14018 - DNA, 22 bp, Artificial Sequence
  bisulfite treated nucleic acid for analysis of methylation status of SEQ ID NO: 26
cgatcttcgacaaaactaaaaa

SEQ ID NO: 14019 - DNA, 16 bp, Artificial Sequence
  bisulfite treated nucleic acid for analysis of methylation status of SEQ ID NO: 26
gagtcggtatcggcgt

SEQ ID NO: 14020 - DNA, 19 bp, Artificial Sequence
  nucleic acid for analysis of methylation status of SEQ ID NO: 26
ggcgtgtttcgtttttatt

SEQ ID NO: 14021 - DNA, 22 bp, Artificial Sequence
  bisulfite treated nucleic acid for analysis of methylation status of SEQ ID NO: 26
tatcaaaatctacgcgatctaa

SEQ ID NO: 14022 - DNA, 20 bp, Artificial Sequence
  bisulfite treated nucleic acid for analysis of methylation status of SEQ ID NO: 26
ttcgcgttaggtttcgtcgg

SEQ ID NO: 14023 - DNA, 18 bp, Artificial Sequence
  bisulfite treated nucleic acid for analysis of methylation status of SEQ ID NO: 26
ggttttcgtaggtcgtta

SEQ ID NO: 14024 - DNA, 21 bp, Artificial Sequence
  bisulfite treated nucleic acid for analysis of methylation status of SEQ ID NO: 26
tcgaggagtttagcgttagtg

SEQ ID NO: 14025 - DNA, 22 bp, Artificial Sequence
  bisulfite treated nucleic acid for analysis of methylation status of SEQ ID NO: 26
aaacccgacatactaaacgaat

SEQ ID NO: 14026 - DNA, 21 bp, Artificial Sequence
  bisulfite treated nucleic acid for analysis of methylation status of SEQ ID NO: 26
gtcgaggagtttagcgttagt

SEQ ID NO: 14027 - DNA, 20 bp, Artificial Sequence
  bisulfite treated nucleic acid for analysis of methylation status of SEQ ID NO: 26
caaaactaaaaacgccgata

SEQ ID NO: 14028 - DNA, 22 bp, Artificial Sequence
  bisulfite treated nucleic acid for analysis of methylation status of SEQ ID NO: 26
atcaaaatctacgcgatctaaa

SEQ ID NO: 14029 - DNA, 19 bp, Artificial Sequence
  bisulfite treated nucleic acid for analysis of methylation status of SEQ ID NO: 26
gtcgttggtcggtagagag

SEQ ID NO: 14030 - DNA, 22 bp, Artificial Sequence
  bisulfite treated nucleic acid for analysis of methylation status of SEQ ID NO: 26
cgcctataaactcgaactctaa

SEQ ID NO: 14031 - DNA, 16 bp, Artificial Sequence
  bisulfite treated nucleic acid for analysis of methylation status of SEQ ID NO: 26
gacgttcgcgagtttt

SEQ ID NO: 14032 - DNA, 20 bp, Artificial Sequence
  bisulfite treated nucleic acid for analysis of methylation status of SEQ ID NO: 26
ttaaatatcgaacgggattt

SEQ ID NO: 14033 - DNA, 23 bp, Artificial Sequence
  bisulfite treated nucleic acid for analysis of methylation status of SEQ ID NO: 26
atatcaaaatctacgcgatctaa

SEQ ID NO: 14034 - DNA, 20 bp, Artificial Sequence
  bisulfite treated nucleic acid for analysis of methylation status of SEQ ID NO: 26
aaactaaaaacgccgatacc

SEQ ID NO: 14035 - DNA, 19 bp, Artificial Sequence
  bisulfite treated nucleic acid for analysis of methylation status of SEQ ID NO: 26
ggttttattgacgcgattt

SEQ ID NO: 14036 - DNA, 18 bp, Artificial Sequence
  bisulfite treated nucleic acid for analysis of methylation status of SEQ ID NO: 26
ggtgcgcgtagagaataa

SEQ ID NO: 14037 - DNA, 21 bp, Artificial Sequence
  bisulfite treated nucleic acid for analysis of methylation status of SEQ ID NO: 26
tcaaaatctacgcgatctaaa

SEQ ID NO: 14038 - DNA, 22 bp, Artificial Sequence
  bisulfite treated nucleic acid for analysis of methylation status of SEQ ID NO: 26
acaaaactaaaaacgccgatac

SEQ ID NO: 14039 - DNA, 21 bp, Artificial Sequence
  bisulfite treated nucleic acid for analysis of methylation status of SEQ ID NO: 26
aaaactaaaaacgccgatacc

SEQ ID NO: 14040 - DNA, 19 bp, Artificial Sequence
  bisulfite treated nucleic acid for analysis of methylation status of SEQ ID NO: 26
gcgtgtttcgtttttattt

SEQ ID NO: 14041 - DNA, 22 bp, Artificial Sequence
  bisulfite treated nucleic acid for analysis of methylation status of SEQ ID NO: 26
aatatcaaaatctacgcgatct

SEQ ID NO: 14042 - DNA, 19 bp, Artificial Sequence
  bisulfite treated nucleic acid for analysis of methylation status of SEQ ID NO: 26
aactaaaaacgccgatacc

SEQ ID NO: 14043 - DNA, 20 bp, Artificial Sequence
  bisulfite treated nucleic acid for analysis of methylation status of SEQ ID NO: 26
atcggttcggagttagatta

SEQ ID NO: 14044 - DNA, 21 bp, Artificial Sequence
  bisulfite treated nucleic acid for analysis of methylation status of SEQ ID NO: 26
caaaactaaaaacgccgatac

SEQ ID NO: 14045 - DNA, 22 bp, Artificial Sequence
  bisulfite treated nucleic acid for analysis of methylation status of SEQ ID NO: 26
aaaatatacgaatcaaccgaac

SEQ ID NO: 14046 - DNA, 20 bp, Artificial Sequence
  bisulfite treated nucleic acid for analysis of methylation status of SEQ ID NO: 26
gaaagtcgcgttagtgaagt

SEQ ID NO: 14047 - DNA, 16 bp, Artificial Sequence
  bisulfite treated nucleic acid for analysis of methylation status of SEQ ID NO: 26
ttcgcgtttgacgggg

SEQ ID NO: 14048 - DNA, 21 bp, Artificial Sequence
  bisulfite treated nucleic acid for analysis of methylation status of SEQ ID NO: 26
agattgggttttttggtcgta

SEQ ID NO: 14049 - DNA, 22 bp, Artificial Sequence
  bisulfite treated nucleic acid for analysis of methylation status of SEQ ID NO: 26
atttttacgttttggaaagtcg

SEQ ID NO: 14050 - DNA, 20 bp, Artificial Sequence
  bisulfite treated nucleic acid for analysis of methylation status of SEQ ID NO: 26
ttttacgttttggaaagtcg

SEQ ID NO: 14051 - DNA, 22 bp, Artificial Sequence
  bisulfite treated nucleic acid for analysis of methylation status of SEQ ID NO: 26
atctaaactaacaccgaacgaa

SEQ ID NO: 14052 - DNA, 20 bp, Artificial Sequence
  bisulfite treated nucleic acid for analysis of methylation status of SEQ ID NO: 26
gaacgaggtacgtttttgag

SEQ ID NO: 14053 - DNA, 16 bp, Artificial Sequence
  bisulfite treated nucleic acid for analysis of methylation status of SEQ ID NO: 26
atcgagcgttcgcgta

SEQ ID NO: 14054 - DNA, 19 bp, Artificial Sequence
  bisulfite treated nucleic acid for analysis of methylation status of SEQ ID NO: 26
aggttttagattcgtacga

SEQ ID NO: 14055 - DNA, 20 bp, Artificial Sequence
  bisulfite treated nucleic acid for analysis of methylation status of SEQ ID NO: 26
agaacgaggtacgtttttga

SEQ ID NO: 14056 - DNA, 20 bp, Artificial Sequence
  bisulfite treated nucleic acid for analysis of methylation status of SEQ ID NO: 26
gagaacgaggtacgtttttg

SEQ ID NO: 14057 - DNA, 22 bp, Artificial Sequence
  bisulfite treated nucleic acid for analysis of methylation status of SEQ ID NO: 26
aaaaatatacgaatcaaccgaa

SEQ ID NO: 14058 - DNA, 22 bp, Artificial Sequence
  bisulfite treated nucleic acid for analysis of methylation status of SEQ ID NO: 26
taaaaatatacgaatcaaccga

SEQ ID NO: 14059 - DNA, 20 bp, Artificial Sequence
  bisulfite treated nucleic acid for analysis of methylation status of SEQ ID NO: 26
aaatcctactcgtacctccg

SEQ ID NO: 14060 - DNA, 22 bp, Artificial Sequence
  bisulfite treated nucleic acid for analysis of methylation status of SEQ ID NO: 26
taatagaaaaggtcggtatcgt

SEQ ID NO: 14061 - DNA, 16 bp, Artificial Sequence
  bisulfite treated nucleic acid for analysis of methylation status of SEQ ID NO: 26
ggacgcgcgcgtatta

SEQ ID NO: 14062 - DNA, 16 bp, Artificial Sequence
  bisulfite treated nucleic acid for analysis of methylation status of SEQ ID NO: 26
tattcggtcggggagg

SEQ ID NO: 14063 - DNA, 21 bp, Artificial Sequence
  bisulfite treated nucleic acid for analysis of methylation status of SEQ ID NO: 26
catctaaactaacaccgaacg

SEQ ID NO: 14064 - DNA, 21 bp, Artificial Sequence
  bisulfite treated nucleic acid for analysis of methylation status of SEQ ID NO: 26
tttttacgttttggaaagtcg

SEQ ID NO: 14065 - DNA, 21 bp, Artificial Sequence
  bisulfite treated nucleic acid for analysis of methylation status of SEQ ID NO: 26
ctaaactaacaccgaacgaaa

SEQ ID NO: 14066 - DNA, 21 bp, Artificial Sequence
  bisulfite treated nucleic acid for analysis of methylation status of SEQ ID NO: 26
tctaaactaacaccgaacgaa

SEQ ID NO: 14067 - DNA, 21 bp, Artificial Sequence
  bisulfite treated nucleic acid for analysis of methylation status of SEQ ID NO: 26
taaactaacaccgaacgaaaa

SEQ ID NO: 14068 - DNA, 19 bp, Artificial Sequence
  bisulfite treated nucleic acid for analysis of methylation status of SEQ ID NO: 26
cctactcgtacctccgaac

SEQ ID NO: 14069 - DNA, 19 bp, Artificial Sequence
  bisulfite treated nucleic acid for analysis of methylation status of SEQ ID NO: 26
cgaccaaaatcctactcgt

SEQ ID NO: 14070 - DNA, 23 bp, Artificial Sequence
  bisulfite treated nucleic acid for analysis of methylation status of SEQ ID NO: 26
ataaaaatatacgaatcaaccga

SEQ ID NO: 14071 - DNA, 21 bp, Artificial Sequence
  bisulfite treated nucleic acid for analysis of methylation status of SEQ ID NO: 26
atcctactcgtacctccgaac

SEQ ID NO: 14072 - DNA, 21 bp, Artificial Sequence
  bisulfite treated nucleic acid for analysis of methylation status of SEQ ID NO: 26
agaacgaggtacgtttttgag

SEQ ID NO: 14073 - DNA, 21 bp, Artificial Sequence
  bisulfite treated nucleic acid for analysis of methylation status of SEQ ID NO: 26
aaaatcctactcgtacctccg

SEQ ID NO: 14074 - DNA, 21 bp, Artificial Sequence
  bisulfite treated nucleic acid for analysis of methylation status of SEQ ID NO: 26
aactaacaccgaacgaaaaat

SEQ ID NO: 14075 - DNA, 17 bp, Artificial Sequence
  bisulfite treated nucleic acid for analysis of methylation status of SEQ ID NO: 26
ttcgcgtaggagttcgt

SEQ ID NO: 14076 - DNA, 19 bp, Artificial Sequence
  bisulfite treated nucleic acid for analysis of methylation status of SEQ ID NO: 26
tgcgaaatttgcggatcga

SEQ ID NO: 14077 - DNA, 20 bp, Artificial Sequence
  bisulfite treated nucleic acid for analysis of methylation status of SEQ ID NO: 26
aacgaggtacgtttttgagt

SEQ ID NO: 14078 - DNA, 22 bp, Artificial Sequence
  bisulfite treated nucleic acid for analysis of methylation status of SEQ ID NO: 26
aatcctactcgtacctccgaac

SEQ ID NO: 14079 - DNA, 23 bp, Artificial Sequence
  bisulfite treated nucleic acid for analysis of methylation status of SEQ ID NO: 26
cataaaaatatacgaatcaaccg

SEQ ID NO: 14080 - DNA, 21 bp, Artificial Sequence
  bisulfite treated nucleic acid for analysis of methylation status of SEQ ID NO: 26
aatatacgaatcaaccgaacc

SEQ ID NO: 14081 - DNA, 19 bp, Artificial Sequence
  bisulfite treated nucleic acid for analysis of methylation status of SEQ ID NO: 26
tcctactcgtacctccgaa

SEQ ID NO: 14082 - DNA, 21 bp, Artificial Sequence
  bisulfite treated nucleic acid for analysis of methylation status of SEQ ID NO: 26
actaacaccgaacgaaaaatc

SEQ ID NO: 14083 - DNA, 22 bp, Artificial Sequence
  bisulfite treated nucleic acid for analysis of methylation status of SEQ ID NO: 26
aaactaacaccgaacgaaaaat

SEQ ID NO: 14084 - DNA, 20 bp, Artificial Sequence
  bisulfite treated nucleic acid for analysis of methylation status of SEQ ID NO: 26
ctaacaccgaacgaaaaatc

SEQ ID NO: 14085 - DNA, 22 bp, Artificial Sequence
  bisulfite treated nucleic acid for analysis of methylation status of SEQ ID NO: 26
catctaaactaacaccgaacga

SEQ ID NO: 14086 - DNA, 19 bp, Artificial Sequence
  bisulfite treated nucleic acid for analysis of methylation status of SEQ ID NO: 26
tttacgttttggaaagtcg

SEQ ID NO: 14087 - DNA, 20 bp, Artificial Sequence
  bisulfite treated nucleic acid for analysis of methylation status of SEQ ID NO: 26
aaactaacaccgaacgaaaa

SEQ ID NO: 14088 - DNA, 19 bp, Artificial Sequence
  bisulfite treated nucleic acid for analysis of methylation status of SEQ ID NO: 26
tttggaaagtcgcgttagt

SEQ ID NO: 14089 - DNA, 21 bp, Artificial Sequence
  bisulfite treated nucleic acid for analysis of methylation status of SEQ ID NO: 26
gagaacgaggtacgtttttga

SEQ ID NO: 14090 - DNA, 18 bp, Artificial Sequence
  bisulfite treated nucleic acid for analysis of methylation status of SEQ ID NO: 26
tacgttttggaaagtcgc

SEQ ID NO: 14091 - DNA, 21 bp, Artificial Sequence
  bisulfite treated nucleic acid for analysis of methylation status of SEQ ID NO: 26
aatagaaaaggtcggtatcgt

SEQ ID NO: 14092 - DNA, 18 bp, Artificial Sequence
  bisulfite treated nucleic acid for analysis of methylation status of SEQ ID NO: 26
ggaaagtcgcgttagtga

SEQ ID NO: 14093 - DNA, 22 bp, Artificial Sequence
  bisulfite treated nucleic acid for analysis of methylation status of SEQ ID NO: 26
gagaacgaggtacgtttttgag

SEQ ID NO: 14094 - DNA, 22 bp, Artificial Sequence
  bisulfite treated nucleic acid for analysis of methylation status of SEQ ID NO: 26
aaatatacgaatcaaccgaacc

SEQ ID NO: 14095 - DNA, 23 bp, Artificial Sequence
  bisulfite treated nucleic acid for analysis of methylation status of SEQ ID NO: 26
taaaaatatacgaatcaaccgaa

SEQ ID NO: 14096 - DNA, 21 bp, Artificial Sequence
  bisulfite treated nucleic acid for analysis of methylation status of SEQ ID NO: 26
gttttggaaagtcgcgttagt

SEQ ID NO: 14097 - DNA, 18 bp, Artificial Sequence
  bisulfite treated nucleic acid for analysis of methylation status of SEQ ID NO: 26
ttttggaaagtcgcgtta

SEQ ID NO: 14098 - DNA, 19 bp, Artificial Sequence
  bisulfite treated nucleic acid for analysis of methylation status of SEQ ID NO: 26
ttacgttttggaaagtcgc

SEQ ID NO: 14099 - DNA, 22 bp, Artificial Sequence
  bisulfite treated nucleic acid for analysis of methylation status of SEQ ID NO: 26
gtgagaacgaggtacgtttttg

SEQ ID NO: 14100 - DNA, 22 bp, Artificial Sequence
  bisulfite treated nucleic acid for analysis of methylation status of SEQ ID NO: 26
ataaaaatatacgaatcaaccg

SEQ ID NO: 14101 - DNA, 18 bp, Artificial Sequence
  bisulfite treated nucleic acid for analysis of methylation status of SEQ ID NO: 26
tttggaaagtcgcgttag

SEQ ID NO: 14102 - DNA, 21 bp, Artificial Sequence
  bisulfite treated nucleic acid for analysis of methylation status of SEQ ID NO: 26
cgttagtgaagttcgtggttt

SEQ ID NO: 14103 - DNA, 21 bp, Artificial Sequence
  bisulfite treated nucleic acid for analysis of methylation status of SEQ ID NO: 26
tgagaacgaggtacgtttttg

SEQ ID NO: 14104 - DNA, 23 bp, Artificial Sequence
  bisulfite treated nucleic acid for analysis of methylation status of SEQ ID NO: 26
gtaatagaaaaggtcggtatcgt

SEQ ID NO: 14105 - DNA, 18 bp, Artificial Sequence
  bisulfite treated nucleic acid for analysis of methylation status of SEQ ID NO: 26
ttggaaagtcgcgttagt

SEQ ID NO: 14106 - DNA, 18 bp, Artificial Sequence
  nucleic acid for analysis of methylation status of SEQ ID NO: 26
tggaaagtcgcgttagtg

SEQ ID NO: 14107 - DNA, 19 bp, Artificial Sequence
  bisulfite treated nucleic acid for analysis of methylation status of SEQ ID NO: 26
cgttagtgaagttcgtggt

SEQ ID NO: 14108 - DNA, 20 bp, Artificial Sequence
  bisulfite treated nucleic acid for analysis of methylation status of SEQ ID NO: 26
actaacaccgaacgaaaaat

SEQ ID NO: 14109 - DNA, 21 bp, Artificial Sequence
  bisulfite treated nucleic acid for analysis of methylation status of SEQ ID NO: 26
acgaccaaaatctaacctacg

SEQ ID NO: 14110 - DNA, 19 bp, Artificial Sequence
  bisulfite treated nucleic acid for analysis of methylation status of SEQ ID NO: 26
ttttaacggttttcggagt

SEQ ID NO: 14111 - DNA, 16 bp, Artificial Sequence
  bisulfite treated nucleic acid for analysis of methylation status of SEQ ID NO: 26
taaaggcggtcggcgt

SEQ ID NO: 14112 - DNA, 16 bp, Artificial Sequence
  bisulfite treated nucleic acid for analysis of methylation status of SEQ ID NO: 26
gggtggagaggggata

SEQ ID NO: 14113 - DNA, 20 bp, Artificial Sequence
  bisulfite treated nucleic acid for analysis of methylation status of SEQ ID NO: 26
cgaccaaaatctaacctacg

SEQ ID NO: 14114 - DNA, 20 bp, Artificial Sequence
  bisulfite treated nucleic acid for analysis of methylation status of SEQ ID NO: 26
acttcactaacgcgactttc

SEQ ID NO: 14115 - DNA, 20 bp, Artificial Sequence
  bisulfite treated nucleic acid for analysis of methylation status of SEQ ID NO: 26
agtttcgagcggtttttagt

SEQ ID NO: 14116 - DNA, 23 bp, Artificial Sequence
  bisulfite treated nucleic acid for analysis of methylation status of SEQ ID NO: 26
ttcgtgatttggtttcgaatcga

SEQ ID NO: 14117 - DNA, 21 bp, Artificial Sequence
  bisulfite treated nucleic acid for analysis of methylation status of SEQ ID NO: 26
tgtttatggtgatttttacgt

SEQ ID NO: 14118 - DNA, 20 bp, Artificial Sequence
  bisulfite treated nucleic acid for analysis of methylation status of SEQ ID NO: 26
gaacttcactaacgcgactt

SEQ ID NO: 14119 - DNA, 20 bp, Artificial Sequence
  bisulfite treated nucleic acid for analysis of methylation status of SEQ ID NO: 26
atggtgatttttacgttttg

SEQ ID NO: 14120 - DNA, 20 bp, Artificial Sequence
  bisulfite treated nucleic acid for analysis of methylation status of SEQ ID NO: 26
atatacgaatcaaccgaacc

SEQ ID NO: 14121 - DNA, 21 bp, Artificial Sequence
  bisulfite treated nucleic acid for analysis of methylation status of SEQ ID NO: 26
aacttcactaacgcgactttc

SEQ ID NO: 14122 - DNA, 22 bp, Artificial Sequence
  bisulfite treated nucleic acid for analysis of methylation status of SEQ ID NO: 26
cgaaactacgacgactacaaat

SEQ ID NO: 14123 - DNA, 18 bp, Artificial Sequence
  bisulfite treated nucleic acid for analysis of methylation status of SEQ ID NO: 26
gtttgtttagcgttgcgt

SEQ ID NO: 14124 - DNA, 16 bp, Artificial Sequence
  bisulfite treated nucleic acid for analysis of methylation status of SEQ ID NO: 26
ttttcgttcgcggagt

SEQ ID NO: 14125 - DNA, 19 bp, Artificial Sequence
  bisulfite treated nucleic acid for analysis of methylation status of SEQ ID NO: 26
gaatcgtttttcggttttg

SEQ ID NO: 14126 - DNA, 20 bp, Artificial Sequence
  bisulfite treated nucleic acid for analysis of methylation status of SEQ ID NO: 26
ggtgagaacgaggtacgttt

SEQ ID NO: 14127 - DNA, 19 bp, Artificial Sequence
  bisulfite treated nucleic acid for analysis of methylation status of SEQ ID NO: 26
ttaacggttttcggagttc

SEQ ID NO: 14128 - DNA, 16 bp, Artificial Sequence
  bisulfite treated nucleic acid for analysis of methylation status of SEQ ID NO: 26
gtggagaggggatagt

SEQ ID NO: 14129 - DNA, 16 bp, Artificial Sequence
  bisulfite treated nucleic acid for analysis of methylation status of SEQ ID NO: 26
ggtggagaggggatag

SEQ ID NO: 14130 - DNA, 19 bp, Artificial Sequence
  bisulfite treated nucleic acid for analysis of methylation status of SEQ ID NO: 26
cgcgcatctaaactaacac

SEQ ID NO: 14131 - DNA, 19 bp, Artificial Sequence
  bisulfite treated nucleic acid for analysis of methylation status of SEQ ID NO: 26
gattcgtacgatttttcgt

SEQ ID NO: 14132 - DNA, 19 bp, Artificial Sequence
  bisulfite treated nucleic acid for analysis of methylation status of SEQ ID NO: 26
aaagtcgcgttagtgaagt

SEQ ID NO: 14133 - DNA, 22 bp, Artificial Sequence
  nucleic acid for analysis of methylation status of SEQ ID NO: 26
aacgaccaaaatctaacctacg

SEQ ID NO: 14134 - DNA, 22 bp, Artificial Sequence
  bisulfite treated nucleic acid for analysis of methylation status of SEQ ID NO: 26
agaacgaggtacgtttttgagt

SEQ ID NO: 14135 - DNA, 20 bp, Artificial Sequence
  bisulfite treated nucleic acid for analysis of methylation status of SEQ ID NO: 26
tttttaacggttttcggagt

SEQ ID NO: 14136 - DNA, 17 bp, Artificial Sequence
  bisulfite treated nucleic acid for analysis of methylation status of SEQ ID NO: 26
acgttttggaaagtcgc

SEQ ID NO: 14137 - DNA, 19 bp, Artificial Sequence
  bisulfite treated nucleic acid for analysis of methylation status of SEQ ID NO: 26
gtttcgagcggtttttagt

SEQ ID NO: 14138 - DNA, 20 bp, Artificial Sequence
  bisulfite treated nucleic acid for analysis of methylation status of SEQ ID NO: 26
aaccacgaacttcactaacg

SEQ ID NO: 14139 - DNA, 19 bp, Artificial Sequence
  bisulfite treated nucleic acid for analysis of methylation status of SEQ ID NO: 26
agtttcgagcggtttttag

SEQ ID NO: 14140 - DNA, 20 bp, Artificial Sequence
  bisulfite treated nucleic acid for analysis of methylation status of SEQ ID NO: 26
gcgttagtgaagttcgtggt

SEQ ID NO: 14141 - DNA, 21 bp, Artificial Sequence
  bisulfite treated nucleic acid for analysis of methylation status of SEQ ID NO: 26
atctaaactaacaccgaacga

SEQ ID NO: 14142 - DNA, 19 bp, Artificial Sequence
  bisulfite treated nucleic acid for analysis of methylation status of SEQ ID NO: 26
cgcatctaaactaacaccg

SEQ ID NO: 14143 - DNA, 20 bp, Artificial Sequence
  bisulfite treated nucleic acid for analysis of methylation status of SEQ ID NO: 26
cgcatctaaactaacaccga

SEQ ID NO: 14144 - DNA, 20 bp, Artificial Sequence
  bisulfite treated nucleic acid for analysis of methylation status of SEQ ID NO: 26
tttacgttttggaaagtcgc

SEQ ID NO: 14145 - DNA, 18 bp, Artificial Sequence
  bisulfite treated nucleic acid for analysis of methylation status of SEQ ID NO: 26
cgcgttagtgaagttcgt

SEQ ID NO: 14146 - DNA, 17 bp, Artificial Sequence
  bisulfite treated nucleic acid for analysis of methylation status of SEQ ID NO: 26
ggagaggggatagtagg

SEQ ID NO: 14147 - DNA, 19 bp, Artificial Sequence
  bisulfite treated nucleic acid for analysis of methylation status of SEQ ID NO: 26
caaacgtcgaacacaaaat

SEQ ID NO: 14148 - DNA, 20 bp, Artificial Sequence
  bisulfite treated nucleic acid for analysis of methylation status of SEQ ID NO: 26
acgtagggtcgaagtaggtt

SEQ ID NO: 14149 - DNA, 18 bp, Artificial Sequence
  bisulfite treated nucleic acid for analysis of methylation status of SEQ ID NO: 26
ttagattcgatcgcgatt

SEQ ID NO: 14150 - DNA, 16 bp, Artificial Sequence
  bisulfite treated nucleic acid for analysis of methylation status of SEQ ID NO: 26
agttggggacgtcggt

SEQ ID NO: 14151 - DNA, 22 bp, Artificial Sequence
  bisulfite treated nucleic acid for analysis of methylation status of SEQ ID NO: 27
ggcgtttagtcgtgtagtttta

SEQ ID NO: 14152 - DNA, 21 bp, Artificial Sequence
  bisulfite treated nucleic acid for analysis of methylation status of SEQ ID NO: 27
aataaattcgccttattcgat

SEQ ID NO: 14153 - DNA, 17 bp, Artificial Sequence
  bisulfite treated nucleic acid for analysis of methylation status of SEQ ID NO: 27
ttcgtaagggtcggcga

SEQ ID NO: 14154 - DNA, 21 bp, Artificial Sequence
  bisulfite treated nucleic acid for analysis of methylation status of SEQ ID NO: 27
tgggttttatcgtttttaatt

SEQ ID NO: 14155 - DNA, 22 bp, Artificial Sequence
  bisulfite treated nucleic acid for analysis of methylation status of SEQ ID NO: 27
gcgtttagtcgtgtagttttat

SEQ ID NO: 14156 - DNA, 22 bp, Artificial Sequence
  bisulfite treated nucleic acid for analysis of methylation status of SEQ ID NO: 27
aaataaattcgccttattcgat

SEQ ID NO: 14157 - DNA, 21 bp, Artificial Sequence
  bisulfite treated nucleic acid for analysis of methylation status of SEQ ID NO: 27
gaatagtcgaggagtcgttgt

SEQ ID NO: 14158 - DNA, 21 bp, Artificial Sequence
  bisulfite treated nucleic acid for analysis of methylation status of SEQ ID NO: 27
tcaatcaaaaacgaacgataa

SEQ ID NO: 14159 - DNA, 21 bp, Artificial Sequence
  bisulfite treated nucleic acid for analysis of methylation status of SEQ ID NO: 27
gtcgttggatttagtcgtcgt

SEQ ID NO: 14160 - DNA, 17 bp, Artificial Sequence
  bisulfite treated nucleic acid for analysis of methylation status of SEQ ID NO: 27
gtaatgaggagaggagt

SEQ ID NO: 14161 - DNA, 20 bp, Artificial Sequence
  bisulfite treated nucleic acid for analysis of methylation status of SEQ ID NO: 27
acggtagtgagagtcgattg

SEQ ID NO: 14162 - DNA, 22 bp, Artificial Sequence
  bisulfite treated nucleic acid for analysis of methylation status of SEQ ID NO: 27
cgtctataaaacgctatctcat

SEQ ID NO: 14163 - DNA, 16 bp, Artificial Sequence
  bisulfite treated nucleic acid for analysis of methylation status of SEQ ID NO: 27
gtcgcgagtttcgggt

SEQ ID NO: 14164 - DNA, 20 bp, Artificial Sequence
  bisulfite treated nucleic acid for analysis of methylation status of SEQ ID NO: 27
tagcgtttaagttttaggtt

SEQ ID NO: 14165 - DNA, 23 bp, Artificial Sequence
  bisulfite treated nucleic acid for analysis of methylation status of SEQ ID NO: 27
acgtctataaaacgctatctcat

SEQ ID NO: 14166 - DNA, 19 bp, Artificial Sequence
  bisulfite treated nucleic acid for analysis of methylation status of SEQ ID NO: 27
cgggaggagtcgtaaataa

SEQ ID NO: 14167 - DNA, 22 bp, Artificial Sequence
  bisulfite treated nucleic acid for analysis of methylation status of SEQ ID NO: 27
gcgtaacaaacgtctaaaaatc

SEQ ID NO: 14168 - DNA, 16 bp, Artificial Sequence
  bisulfite treated nucleic acid for analysis of methylation status of SEQ ID NO: 27
tagtcgaagcgggcga

SEQ ID NO: 14169 - DNA, 21 bp, Artificial Sequence
  bisulfite treated nucleic acid for analysis of methylation status of SEQ ID NO: 27
ttcgtgattggtttcgttcgg

SEQ ID NO: 14170 - DNA, 22 bp, Artificial Sequence
  bisulfite treated nucleic acid for analysis of methylation status of SEQ ID NO: 27
gtaacaaacgtctaaaaatcgc

SEQ ID NO: 14171 - DNA, 20 bp, Artificial Sequence
  bisulfite treated nucleic acid for analysis of methylation status of SEQ ID NO: 27
gttgcgtagatagcgttttt

SEQ ID NO: 14172 - DNA, 20 bp, Artificial Sequence
  bisulfite treated nucleic acid for analysis of methylation status of SEQ ID NO: 27
tatcacttaacccgaacgac

SEQ ID NO: 14173 - DNA, 20 bp, Artificial Sequence
  bisulfite treated nucleic acid for analysis of methylation status of SEQ ID NO: 27
atgcgggtttgtgtcgtcgt

SEQ ID NO: 14174 - DNA, 19 bp, Artificial Sequence
  bisulfite treated nucleic acid for analysis of methylation status of SEQ ID NO: 27
gagtagtttttgattcggg

SEQ ID NO: 14175 - DNA, 21 bp, Artificial Sequence
  bisulfite treated nucleic acid for analysis of methylation status of SEQ ID NO: 27
cgaataaggcgaatttatttt

SEQ ID NO: 14176 - DNA, 20 bp, Artificial Sequence
  bisulfite treated nucleic acid for analysis of methylation status of SEQ ID NO: 27
cgtttatttacgactcctcc

SEQ ID NO: 14177 - DNA, 19 bp, Artificial Sequence
  bisulfite treated nucleic acid for analysis of methylation status of SEQ ID NO: 27
ttcgttcggttattttcgg

SEQ ID NO: 14178 - DNA, 22 bp, Artificial Sequence
  bisulfite treated nucleic acid for analysis of methylation status of SEQ ID NO: 27
attggttttttaggttgatcgg

SEQ ID NO: 14179 - DNA, 21 bp, Artificial Sequence
  bisulfite treated nucleic acid for analysis of methylation status of SEQ ID NO: 27
taacaaacgtctaaaaatcgc

SEQ ID NO: 14180 - DNA, 24 bp, Artificial Sequence
  bisulfite treated nucleic acid for analysis of methylation status of SEQ ID NO: 27
aaaaacgtctataaaacgctatct

SEQ ID NO: 14181 - DNA, 22 bp, Artificial Sequence
  bisulfite treated nucleic acid for analysis of methylation status of SEQ ID NO: 27
gtttaagttttaggttaatgag

SEQ ID NO: 14182 - DNA, 20 bp, Artificial Sequence
  bisulfite treated nucleic acid for analysis of methylation status of SEQ ID NO: 27
tttatcacttaacccgaacg

SEQ ID NO: 14183 - DNA, 22 bp, Artificial Sequence
  bisulfite treated nucleic acid for analysis of methylation status of SEQ ID NO: 27
gtagtgagagtcgattggtcgt

SEQ ID NO: 14184 - DNA, 23 bp, Artificial Sequence
  bisulfite treated nucleic acid for analysis of methylation status of SEQ ID NO: 27
cgtctataaaacgctatctcatt

SEQ ID NO: 14185 - DNA, 23 bp, Artificial Sequence
  bisulfite treated nucleic acid for analysis of methylation status of SEQ ID NO: 27
aaaacgtctataaaacgctatct

SEQ ID NO: 14186 - DNA, 23 bp, Artificial Sequence
  bisulfite treated nucleic acid for analysis of methylation status of SEQ ID NO: 27
aacgtctataaaacgctatctca

SEQ ID NO: 14187 - DNA, 21 bp, Artificial Sequence
  bisulfite treated nucleic acid for analysis of methylation status of SEQ ID NO: 27
tagtgagagtcgattggtcgt

SEQ ID NO: 14188 - DNA, 22 bp, Artificial Sequence
  bisulfite treated nucleic acid for analysis of methylation status of SEQ ID NO: 27
acgtctataaaacgctatctca

SEQ ID NO: 14189 - DNA, 21 bp, Artificial Sequence
  bisulfite treated nucleic acid for analysis of methylation status of SEQ ID NO: 27
ctttatcacttaacccgaacg

SEQ ID NO: 14190 - DNA, 19 bp, Artificial Sequence
  bisulfite treated nucleic acid for analysis of methylation status of SEQ ID NO: 27
tcgggaggagtcgtaaata

SEQ ID NO: 14191 - DNA, 19 bp, Artificial Sequence
  bisulfite treated nucleic acid for analysis of methylation status of SEQ ID NO: 27
ttatttacgactcctcccg

SEQ ID NO: 14192 - DNA, 22 bp, Artificial Sequence
  bisulfite treated nucleic acid for analysis of methylation status of SEQ ID NO: 27
tcgtgtagttttattagcgttt

SEQ ID NO: 14193 - DNA, 20 bp, Artificial Sequence
  bisulfite treated nucleic acid for analysis of methylation status of SEQ ID NO: 27
ataaattcgccttattcgat

SEQ ID NO: 14194 - DNA, 20 bp, Artificial Sequence
  bisulfite treated nucleic acid for analysis of methylation status of SEQ ID NO: 27
ggaatagtcgaggagtcgtt

SEQ ID NO: 14195 - DNA, 23 bp, Artificial Sequence
  bisulfite treated nucleic acid for analysis of methylation status of SEQ ID NO: 27
gtcgtgtagttttattagcgttt

SEQ ID NO: 14196 - DNA, 23 bp, Artificial Sequence
  bisulfite treated nucleic acid for analysis of methylation status of SEQ ID NO: 27
gcgtttagtcgtgtagttttatt

SEQ ID NO: 14197 - DNA, 21 bp, Artificial Sequence
  bisulfite treated nucleic acid for analysis of methylation status of SEQ ID NO: 27
ttatcacttaacccgaacgac

SEQ ID NO: 14198 - DNA, 24 bp, Artificial Sequence
  bisulfite treated nucleic acid for analysis of methylation status of SEQ ID NO: 27
aacgtctataaaacgctatctcat

SEQ ID NO: 14199 - DNA, 20 bp, Artificial Sequence
  bisulfite treated nucleic acid for analysis of methylation status of SEQ ID NO: 27
caatcaaaaacgaacgataa

SEQ ID NO: 14200 - DNA, 22 bp, Artificial Sequence
  bisulfite treated nucleic acid for analysis of methylation status of SEQ ID NO: 27
tcgaataaggcgaatttatttt

SEQ ID NO: 14201 - DNA, 20 bp, Artificial Sequence
  bisulfite treated nucleic acid for analysis of methylation status of SEQ ID NO: 27
aatagtcgaggagtcgttgt

SEQ ID NO: 14202 - DNA, 22 bp, Artificial Sequence
  bisulfite treated nucleic acid for analysis of methylation status of SEQ ID NO: 27
cgtaacaaacgtctaaaaatcg

SEQ ID NO: 14203 - DNA, 22 bp, Artificial Sequence
  bisulfite treated nucleic acid for analysis of methylation status of SEQ ID NO: 27
aaacgtctataaaacgctatct

SEQ ID NO: 14204 - DNA, 22 bp, Artificial Sequence
  bisulfite treated nucleic acid for analysis of methylation status of SEQ ID NO: 31
acgtatagattgatcgagtggt

SEQ ID NO: 14205 - DNA, 21 bp, Artificial Sequence
  bisulfite treated nucleic acid for analysis of methylation status of SEQ ID NO: 31
aaaataatcgtaacctacgcc

SEQ ID NO: 14206 - DNA, 23 bp, Artificial Sequence
  bisulfite treated nucleic acid for analysis of methylation status of SEQ ID NO: 31
tttcgtcgttataattagagcga

SEQ ID NO: 14207 - DNA, 17 bp, Artificial Sequence
  bisulfite treated nucleic acid for analysis of methylation status of SEQ ID NO: 31
tggtgagtgaattcggt

SEQ ID NO: 14208 - DNA, 22 bp, Artificial Sequence
  bisulfite treated nucleic acid for analysis of methylation status of SEQ ID NO: 31
aaaaataatcgtaacctacgcc

SEQ ID NO: 14209 - DNA, 17 bp, Artificial Sequence
  bisulfite treated nucleic acid for analysis of methylation status of SEQ ID NO: 31
tgagtgaattcggtcgg

SEQ ID NO: 14210 - DNA, 22 bp, Artificial Sequence
  bisulfite treated nucleic acid for analysis of methylation status of SEQ ID NO: 31
aacgtatagattgatcgagtgg

SEQ ID NO: 14211 - DNA, 22 bp, Artificial Sequence
  bisulfite treated nucleic acid for analysis of methylation status of SEQ ID NO: 31
tattttagtatcgttgtgtcgc

SEQ ID NO: 14212 - DNA, 20 bp, Artificial Sequence
  bisulfite treated nucleic acid for analysis of methylation status of SEQ ID NO: 31
tatcgaaccgcaaaaattac

SEQ ID NO: 14213 - DNA, 25 bp, Artificial Sequence
  bisulfite treated nucleic acid for analysis of methylation status of SEQ ID NO: 31
tttgttatattgttgtggagtatgt

SEQ ID NO: 14214 - DNA, 16 bp, Artificial Sequence
  bisulfite treated nucleic acid for analysis of methylation status of SEQ ID NO: 31
gttcggtcgcggggag

SEQ ID NO: 14215 - DNA, 21 bp, Artificial Sequence
  bisulfite treated nucleic acid for analysis of methylation status of SEQ ID NO: 31
ctatcgaaccgcaaaaattac

SEQ ID NO: 14216 - DNA, 21 bp, Artificial Sequence
  bisulfite treated nucleic acid for analysis of methylation status of SEQ ID NO: 31
cgtatagattgatcgagtggt

SEQ ID NO: 14217 - DNA, 23 bp, Artificial Sequence
  bisulfite treated nucleic acid for analysis of methylation status of SEQ ID NO: 31
ttaacgtatagattgatcgagtg

SEQ ID NO: 14218 - DNA, 21 bp, Artificial Sequence
  bisulfite treated nucleic acid for analysis of methylation status of SEQ ID NO: 31
cgaatccgaaaactctaaaaa

SEQ ID NO: 14219 - DNA, 20 bp, Artificial Sequence
  bisulfite treated nucleic acid for analysis of methylation status of SEQ ID NO: 31
gttgggggtgtaggttatga

SEQ ID NO: 14220 - DNA, 17 bp, Artificial Sequence
  bisulfite treated nucleic acid for analysis of methylation status of SEQ ID NO: 31
gaggttggtgagtgaat

SEQ ID NO: 14221 - DNA, 20 bp, Artificial Sequence
  bisulfite treated nucleic acid for analysis of methylation status of SEQ ID NO: 31
aataatcgtaacctacgccc

SEQ ID NO: 14222 - DNA, 16 bp, Artificial Sequence
  bisulfite treated nucleic acid for analysis of methylation status of SEQ ID NO: 31
agtgaattcggtcggg

SEQ ID NO: 14223 - DNA, 23 bp, Artificial Sequence
  bisulfite treated nucleic acid for analysis of methylation status of SEQ ID NO: 31
taacgtatagattgatcgagtgg

SEQ ID NO: 14224 - DNA, 19 bp, Artificial Sequence
  bisulfite treated nucleic acid for analysis of methylation status of SEQ ID NO: 31
atcgaaccgcaaaaattac

SEQ ID NO: 14225 - DNA, 21 bp, Artificial Sequence
  bisulfite treated nucleic acid for analysis of methylation status of SEQ ID NO: 31
aaataatcgtaacctacgccc

SEQ ID NO: 14226 - DNA, 21 bp, Artificial Sequence
  bisulfite treated nucleic acid for analysis of methylation status of SEQ ID NO: 31
aggaatttgtttcgtcgttat

SEQ ID NO: 14227 - DNA, 20 bp, Artificial Sequence
  bisulfite treated nucleic acid for analysis of methylation status of SEQ ID NO: 31
cgaatccgaaaactctaaaa

SEQ ID NO: 14228 - DNA, 22 bp, Artificial Sequence
  bisulfite treated nucleic acid for analysis of methylation status of SEQ ID NO: 31
cgtatagattgatcgagtggtt

SEQ ID NO: 14229 - DNA, 21 bp, Artificial Sequence
  bisulfite treated nucleic acid for analysis of methylation status of SEQ ID NO: 31
attttagtatcgttgtgtcgc

SEQ ID NO: 14230 - DNA, 21 bp, Artificial Sequence
  bisulfite treated nucleic acid for analysis of methylation status of SEQ ID NO: 31
acgtatagattgatcgagtgg

SEQ ID NO: 14231 - DNA, 19 bp, Artificial Sequence
  bisulfite treated nucleic acid for analysis of methylation status of SEQ ID NO: 31
ataatcgtaacctacgccc

SEQ ID NO: 14232 - DNA, 18 bp, Artificial Sequence
  bisulfite treated nucleic acid for analysis of methylation status of SEQ ID NO: 31
gttggtgagtgaattcgg

SEQ ID NO: 14233 - DNA, 23 bp, Artificial Sequence
  bisulfite treated nucleic acid for analysis of methylation status of SEQ ID NO: 31
ggtattttagtatcgttgtgtcg

SEQ ID NO: 14234 - DNA, 16 bp, Artificial Sequence
  bisulfite treated nucleic acid for analysis of methylation status of SEQ ID NO: 31
ggttcggtcgcgggga

SEQ ID NO: 14235 - DNA, 21 bp, Artificial Sequence
  bisulfite treated nucleic acid for analysis of methylation status of SEQ ID NO: 31
ggcgtaggttacgattatttt

SEQ ID NO: 14236 - DNA, 20 bp, Artificial Sequence
  bisulfite treated nucleic acid for analysis of methylation status of SEQ ID NO: 31
atctaaacgaatcccgctac

SEQ ID NO: 14237 - DNA, 16 bp, Artificial Sequence
  bisulfite treated nucleic acid for analysis of methylation status of SEQ ID NO: 31
ttacggatcgttcggg

SEQ ID NO: 14238 - DNA, 19 bp, Artificial Sequence
  bisulfite treated nucleic acid for analysis of methylation status of SEQ ID NO: 31
tagagttttcggattcgaa

SEQ ID NO: 14239 - DNA, 23 bp, Artificial Sequence
  bisulfite treated nucleic acid for analysis of methylation status of SEQ ID NO: 31
gtattttagtatcgttgtgtcgc

SEQ ID NO: 14240 - DNA, 18 bp, Artificial Sequence
  bisulfite treated nucleic acid for analysis of methylation status of SEQ ID NO: 31
tcgaaccgcaaaaattac

SEQ ID NO: 14241 - DNA, 22 bp, Artificial Sequence
  bisulfite treated nucleic acid for analysis of methylation status of SEQ ID NO: 31
gaggaatttgtttcgtcgttat

SEQ ID NO: 14242 - DNA, 19 bp, Artificial Sequence
  bisulfite treated nucleic acid for analysis of methylation status of SEQ ID NO: 31
tctaaacgaatcccgctac

SEQ ID NO: 14243 - DNA, 20 bp, Artificial Sequence
  bisulfite treated nucleic acid for analysis of methylation status of SEQ ID NO: 31
ggaatttgtttcgtcgttat

SEQ ID NO: 14244 - DNA, 22 bp, Artificial Sequence
  bisulfite treated nucleic acid for analysis of methylation status of SEQ ID NO: 31
ggcgtaggttacgattattttt

SEQ ID NO: 14245 - DNA, 20 bp, Artificial Sequence
  bisulfite treated nucleic acid for analysis of methylation status of SEQ ID NO: 31
aatctaaacgaatcccgcta

SEQ ID NO: 14246 - DNA, 22 bp, Artificial Sequence
  bisulfite treated nucleic acid for analysis of methylation status of SEQ ID NO: 31
gctatcgaaccgcaaaaattac

SEQ ID NO: 14247 - DNA, 18 bp, Artificial Sequence
  bisulfite treated nucleic acid for analysis of methylation status of SEQ ID NO: 31
cgactccatcctcgaaat

SEQ ID NO: 14248 - DNA, 21 bp, Artificial Sequence
  bisulfite treated nucleic acid for analysis of methylation status of SEQ ID NO: 31
tacgtaatttttgcggttcga

SEQ ID NO: 14249 - DNA, 25 bp, Artificial Sequence
  bisulfite treated nucleic acid for analysis of methylation status of SEQ ID NO: 31
ttcgttatatcgtcgtggagtacgt

SEQ ID NO: 14250 - DNA, 18 bp, Artificial Sequence
  bisulfite treated nucleic acid for analysis of methylation status of SEQ ID NO: 31
gatttagggagtcgcgtt

SEQ ID NO: 14251 - DNA, 21 bp, Artificial Sequence
  bisulfite treated nucleic acid for analysis of methylation status of SEQ ID NO: 31
acgtactccacgacgatataa

SEQ ID NO: 14252 - DNA, 17 bp, Artificial Sequence
  nucleic acid for analysis of methylation status of SEQ ID NO: 31
gtcgcggggagtttcgt

SEQ ID NO: 14253 - DNA, 16 bp, Artificial Sequence
  bisulfite treated nucleic acid for analysis of methylation status of SEQ ID NO: 31
atcgttgtgtcgcggt

SEQ ID NO: 14254 - DNA, 18 bp, Artificial Sequence
  bisulfite treated nucleic acid for analysis of methylation status of SEQ ID NO: 31
atttagggagtcgcgttc

SEQ ID NO: 14255 - DNA, 20 bp, Artificial Sequence
  bisulfite treated nucleic acid for analysis of methylation status of SEQ ID NO: 31
ttttagtatcgttgtgtcgc

SEQ ID NO: 14256 - DNA, 21 bp, Artificial Sequence
  bisulfite treated nucleic acid for analysis of methylation status of SEQ ID NO: 31
gcgtaggttacgattattttt

SEQ ID NO: 14257 - DNA, 20 bp, Artificial Sequence
  bisulfite treated nucleic acid for analysis of methylation status of SEQ ID NO: 31
gggcgtaggttacgattatt

SEQ ID NO: 14258 - DNA, 19 bp, Artificial Sequence
  bisulfite treated nucleic acid for analysis of methylation status of SEQ ID NO: 31
ttattcgttacggatcgtt

SEQ ID NO: 14259 - DNA, 20 bp, Artificial Sequence
  bisulfite treated nucleic acid for analysis of methylation status of SEQ ID NO: 31
ggttttttagagttttcgga

SEQ ID NO: 14260 - DNA, 20 bp, Artificial Sequence
  bisulfite treated nucleic acid for analysis of methylation status of SEQ ID NO: 31
cgtatagattgatcgagtgg

SEQ ID NO: 14261 - DNA, 24 bp, Artificial Sequence
  bisulfite treated nucleic acid for analysis of methylation status of SEQ ID NO: 31
aggtattttagtatcgttgtgtcg

SEQ ID NO: 14262 - DNA, 18 bp, Artificial Sequence
  bisulfite treated nucleic acid for analysis of methylation status of SEQ ID NO: 31
acgtaatttttgcggttc

SEQ ID NO: 14263 - DNA, 22 bp, Artificial Sequence
  bisulfite treated nucleic acid for analysis of methylation status of SEQ ID NO: 31
aaccactcgatcaatctatacg

SEQ ID NO: 14264 - DNA, 16 bp, Artificial Sequence
  bisulfite treated nucleic acid for analysis of methylation status of SEQ ID NO: 31
tagcgacgtcgcgatt

SEQ ID NO: 14265 - DNA, 16 bp, Artificial Sequence
  bisulfite treated nucleic acid for analysis of methylation status of SEQ ID NO: 31
gggtggagtaagaggg

SEQ ID NO: 14266 - DNA, 21 bp, Artificial Sequence
  bisulfite treated nucleic acid for analysis of methylation status of SEQ ID NO: 31
aatctaaacgaatcccgctac

SEQ ID NO: 14267 - DNA, 22 bp, Artificial Sequence
  bisulfite treated nucleic acid for analysis of methylation status of SEQ ID NO: 31
taacgtatagattgatcgagtg

SEQ ID NO: 14268 - DNA, 17 bp, Artificial Sequence
  bisulfite treated nucleic acid for analysis of methylation status of SEQ ID NO: 31
tttagggagtcgcgttc

SEQ ID NO: 14269 - DNA, 16 bp, Artificial Sequence
  bisulfite treated nucleic acid for analysis of methylation status of SEQ ID NO: 31
ggttcgacggacgttt

SEQ ID NO: 14270 - DNA, 22 bp, Artificial Sequence
  bisulfite treated nucleic acid for analysis of methylation status of SEQ ID NO: 31
acgctaaataatctaaaccacg

SEQ ID NO: 14271 - DNA, 17 bp, Artificial Sequence
  bisulfite treated nucleic acid for analysis of methylation status of SEQ ID NO: 31
atcgcggcggatatcgt

SEQ ID NO: 14272 - DNA, 24 bp, Artificial Sequence
  bisulfite treated nucleic acid for analysis of methylation status of SEQ ID NO: 31
ttcgcgggtattattagtacgcgt

SEQ ID NO: 14273 - DNA, 16 bp, Artificial Sequence
  bisulfite treated nucleic acid for analysis of methylation status of SEQ ID NO: 31
atatggggttcgacgg

SEQ ID NO: 14274 - DNA, 21 bp, Artificial Sequence
  bisulfite treated nucleic acid for analysis of methylation status of SEQ ID NO: 31
gtaggatttagggagtcgcgt

SEQ ID NO: 14275 - DNA, 16 bp, Artificial Sequence
  bisulfite treated nucleic acid for analysis of methylation status of SEQ ID NO: 31
ttcggtcgcggggagt

SEQ ID NO: 14276 - DNA, 21 bp, Artificial Sequence
  bisulfite treated nucleic acid for analysis of methylation status of SEQ ID NO: 31
ttgaggtattttagtatcgtt

SEQ ID NO: 14277 - DNA, 16 bp, Artificial Sequence
  bisulfite treated nucleic acid for analysis of methylation status of SEQ ID NO: 31
gtgaggggttcgttcg

SEQ ID NO: 14278 - DNA, 22 bp, Artificial Sequence
  bisulfite treated nucleic acid for analysis of methylation status of SEQ ID NO: 31
gcgacacaacgatactaaaata

SEQ ID NO: 14279 - DNA, 16 bp, Artificial Sequence
  bisulfite treated nucleic acid for analysis of methylation status of SEQ ID NO: 31
ggagtcgcgttcggag

SEQ ID NO: 14280 - DNA, 17 bp, Artificial Sequence
  bisulfite treated nucleic acid for analysis of methylation status of SEQ ID NO: 31
tgggggcgtaggattta

SEQ ID NO: 14281 - DNA, 22 bp, Artificial Sequence
  bisulfite treated nucleic acid for analysis of methylation status of SEQ ID NO: 31
tgaggaatttgtttcgtcgtta

SEQ ID NO: 14282 - DNA, 18 bp, Artificial Sequence
  bisulfite treated nucleic acid for analysis of methylation status of SEQ ID NO: 31
ctaaacgaatcccgctac

SEQ ID NO: 14283 - DNA, 21 bp, Artificial Sequence
  bisulfite treated nucleic acid for analysis of methylation status of SEQ ID NO: 31
accactcgatcaatctatacg

SEQ ID NO: 14284 - DNA, 20 bp, Artificial Sequence
  bisulfite treated nucleic acid for analysis of methylation status of SEQ ID NO: 31
taggatttagggagtcgcgt

SEQ ID NO: 14285 - DNA, 18 bp, Artificial Sequence
  bisulfite treated nucleic acid for analysis of methylation status of SEQ ID NO: 31
taatcgtaacctacgccc

SEQ ID NO: 14286 - DNA, 17 bp, Artificial Sequence
  bisulfite treated nucleic acid for analysis of methylation status of SEQ ID NO: 31
gttcgacggacgttttt

SEQ ID NO: 14287 - DNA, 22 bp, Artificial Sequence
  bisulfite treated nucleic acid for analysis of methylation status of SEQ ID NO: 31
cgctaaataatctaaaccacga

SEQ ID NO: 14288 - DNA, 19 bp, Artificial Sequence
  bisulfite treated nucleic acid for analysis of methylation status of SEQ ID NO: 31
gtacgacggtaaggattat

SEQ ID NO: 14289 - DNA, 20 bp, Artificial Sequence
  bisulfite treated nucleic acid for analysis of methylation status of SEQ ID NO: 31
ggcgtaggttacgattattt

SEQ ID NO: 14290 - DNA, 22 bp, Artificial Sequence
  bisulfite treated nucleic acid for analysis of methylation status of SEQ ID NO: 31
aaatctaaacgaatcccgctac

SEQ ID NO: 14291 - DNA, 16 bp, Artificial Sequence
  bisulfite treated nucleic acid for analysis of methylation status of SEQ ID NO: 31
ccatcctcgaaatcgc

SEQ ID NO: 14292 - DNA, 17 bp, Artificial Sequence
  bisulfite treated nucleic acid for analysis of methylation status of SEQ ID NO: 31
agtgaggggttcgttcg

SEQ ID NO: 14293 - DNA, 22 bp, Artificial Sequence
  bisulfite treated nucleic acid for analysis of methylation status of SEQ ID NO: 31
aataactacgacataaaacccg

SEQ ID NO: 14294 - DNA, 20 bp, Artificial Sequence
  bisulfite treated nucleic acid for analysis of methylation status of SEQ ID NO: 31
atttgagttacggtgttcgt

SEQ ID NO: 14295 - DNA, 16 bp, Artificial Sequence
  bisulfite treated nucleic acid for analysis of methylation status of SEQ ID NO: 31
gtcgtacgcgtgttgg

SEQ ID NO: 14296 - DNA, 21 bp, Artificial Sequence
  bisulfite treated nucleic acid for analysis of methylation status of SEQ ID NO: 31
ttagggagatgtaatttttgt

SEQ ID NO: 14297 - DNA, 22 bp, Artificial Sequence
  bisulfite treated nucleic acid for analysis of methylation status of SEQ ID NO: 31
ataactacgacataaaacccga

SEQ ID NO: 14298 - DNA, 21 bp, Artificial Sequence
  bisulfite treated nucleic acid for analysis of methylation status of SEQ ID NO: 31
gatttgagttacggtgttcgt

SEQ ID NO: 14299 - DNA, 22 bp, Artificial Sequence
  bisulfite treated nucleic acid for analysis of methylation status of SEQ ID NO: 31
taactacgacataaaacccgac

SEQ ID NO: 14300 - DNA, 19 bp, Artificial Sequence
  bisulfite treated nucleic acid for analysis of methylation status of SEQ ID NO: 31
tttgagttacggtgttcgt

SEQ ID NO: 14301 - DNA, 21 bp, Artificial Sequence
  bisulfite treated nucleic acid for analysis of methylation status of SEQ ID NO: 31
aactacgacataaaacccgac

SEQ ID NO: 14302 - DNA, 22 bp, Artificial Sequence
  bisulfite treated nucleic acid for analysis of methylation status of SEQ ID NO: 31
tgatttgagttacggtgttcgt

SEQ ID NO: 14303 - DNA, 22 bp, Artificial Sequence
  bisulfite treated nucleic acid for analysis of methylation status of SEQ ID NO: 31
gtgatttgagttacggtgttcg

SEQ ID NO: 14304 - DNA, 23 bp, Artificial Sequence
  bisulfite treated nucleic acid for analysis of methylation status of SEQ ID NO: 31
aaataactacgacataaaacccg

SEQ ID NO: 14305 - DNA, 20 bp, Artificial Sequence
  bisulfite treated nucleic acid for analysis of methylation status of SEQ ID NO: 31
actacgacataaaacccgac

SEQ ID NO: 14306 - DNA, 22 bp, Artificial Sequence
  bisulfite treated nucleic acid for analysis of methylation status of SEQ ID NO: 31
ctacgaaaaccgactaaaatct

SEQ ID NO: 14307 - DNA, 18 bp, Artificial Sequence
  bisulfite treated nucleic acid for analysis of methylation status of SEQ ID NO: 31
cgcgtgttggtgatattc

SEQ ID NO: 14308 - DNA, 16 bp, Artificial Sequence
  bisulfite treated nucleic acid for analysis of methylation status of SEQ ID NO: 31
ggaggcgttcgtcggg

SEQ ID NO: 14309 - DNA, 25 bp, Artificial Sequence
  bisulfite treated nucleic acid for analysis of methylation status of SEQ ID NO: 31
tgtcgtagttatttattttttggag

SEQ ID NO: 14310 - DNA, 18 bp, Artificial Sequence
  bisulfite treated nucleic acid for analysis of methylation status of SEQ ID NO: 31
cgtgttggtgatattcgc

SEQ ID NO: 14311 - DNA, 16 bp, Artificial Sequence
  bisulfite treated nucleic acid for analysis of methylation status of SEQ ID NO: 31
aggcgttcgtcgggtt

SEQ ID NO: 14312 - DNA, 22 bp, Artificial Sequence
  bisulfite treated nucleic acid for analysis of methylation status of SEQ ID NO: 31
acgaaactaataaataaacccg

SEQ ID NO: 14313 - DNA, 17 bp, Artificial Sequence
  bisulfite treated nucleic acid for analysis of methylation status of SEQ ID NO: 31
cggattcggagattttg

SEQ ID NO: 14314 - DNA, 16 bp, Artificial Sequence
  bisulfite treated nucleic acid for analysis of methylation status of SEQ ID NO: 31
ggcggttcgtggcgga

SEQ ID NO: 14315 - DNA, 20 bp, Artificial Sequence
  bisulfite treated nucleic acid for analysis of methylation status of SEQ ID NO: 31
gtcgtgatttgcgttttcgg

SEQ ID NO: 14316 - DNA, 20 bp, Artificial Sequence
  bisulfite treated nucleic acid for analysis of methylation status of SEQ ID NO: 31
aattcctacgattcgacaac

SEQ ID NO: 14317 - DNA, 20 bp, Artificial Sequence
  bisulfite treated nucleic acid for analysis of methylation status of SEQ ID NO: 31
tattcggttagtttgtgcgt

SEQ ID NO: 14318 - DNA, 17 bp, Artificial Sequence
  bisulfite treated nucleic acid for analysis of methylation status of SEQ ID NO: 31
tattttcggaatcgcgg

SEQ ID NO: 14319 - DNA, 22 bp, Artificial Sequence
  bisulfite treated nucleic acid for analysis of methylation status of SEQ ID NO: 31
gtttatttttaatattgcggtt

SEQ ID NO: 14320 - DNA, 22 bp, Artificial Sequence
  bisulfite treated nucleic acid for analysis of methylation status of SEQ ID NO: 31
aaactaactacgaaaaccgact

SEQ ID NO: 14321 - DNA, 20 bp, Artificial Sequence
  bisulfite treated nucleic acid for analysis of methylation status of SEQ ID NO: 31
attttttggagggtgtgaga

SEQ ID NO: 14322 - DNA, 24 bp, Artificial Sequence
  bisulfite treated nucleic acid for analysis of methylation status of SEQ ID NO: 31
taaataactacgacataaaacccg

SEQ ID NO: 14323 - DNA, 22 bp, Artificial Sequence
  bisulfite treated nucleic acid for analysis of methylation status of SEQ ID NO: 31
gttattcggttagtttgtgcgt

SEQ ID NO: 14324 - DNA, 21 bp, Artificial Sequence
  bisulfite treated nucleic acid for analysis of methylation status of SEQ ID NO: 31
actaataaataaacccgaccg

SEQ ID NO: 14325 - DNA, 18 bp, Artificial Sequence
  bisulfite treated nucleic acid for analysis of methylation status of SEQ ID NO: 31
cgttgtttcggggtagat

SEQ ID NO: 14326 - DNA, 18 bp, Artificial Sequence
  bisulfite treated nucleic acid for analysis of methylation status of SEQ ID NO: 31
attcggagattttgaggg

SEQ ID NO: 14327 - DNA, 21 bp, Artificial Sequence
  bisulfite treated nucleic acid for analysis of methylation status of SEQ ID NO: 31
ttattcggttagtttgtgcgt

SEQ ID NO: 14328 - DNA, 21 bp, Artificial Sequence
  nucleic acid for analysis of methylation status of SEQ ID NO: 31
caattcctacgattcgacaac

SEQ ID NO: 14329 - DNA, 22 bp, Artificial Sequence
  bisulfite treated nucleic acid for analysis of methylation status of SEQ ID NO: 31
aactaataaataaacccgaccg

SEQ ID NO: 14330 - DNA, 19 bp, Artificial Sequence
  bisulfite treated nucleic acid for analysis of methylation status of SEQ ID NO: 31
attcggttagtttgtgcgt

SEQ ID NO: 14331 - DNA, 23 bp, Artificial Sequence
  bisulfite treated nucleic acid for analysis of methylation status of SEQ ID NO: 31
actacgaaaaccgactaaaatct

SEQ ID NO: 14332 - DNA, 18 bp, Artificial Sequence
  bisulfite treated nucleic acid for analysis of methylation status of SEQ ID NO: 31
ggcgttcgtcgggtttta

SEQ ID NO: 14333 - DNA, 25 bp, Artificial Sequence
  bisulfite treated nucleic acid for analysis of methylation status of SEQ ID NO: 31
gtcgtagttatttattttttggagg

SEQ ID NO: 14334 - DNA, 17 bp, Artificial Sequence
  bisulfite treated nucleic acid for analysis of methylation status of SEQ ID NO: 31
tcgttgtttcggggtag

SEQ ID NO: 14335 - DNA, 16 bp, Artificial Sequence
  bisulfite treated nucleic acid for analysis of methylation status of SEQ ID NO: 31
attcgggcggttcgtg

SEQ ID NO: 14336 - DNA, 19 bp, Artificial Sequence
  bisulfite treated nucleic acid for analysis of methylation status of SEQ ID NO: 31
ggattcggagattttgagg

SEQ ID NO: 14337 - DNA, 22 bp, Artificial Sequence
  bisulfite treated nucleic acid for analysis of methylation status of SEQ ID NO: 31
gaaactaactacgaaaaccgac

SEQ ID NO: 14338 - DNA, 17 bp, Artificial Sequence
  bisulfite treated nucleic acid for analysis of methylation status of SEQ ID NO: 31
tggtgatattcgcggag

SEQ ID NO: 14339 - DNA, 20 bp, Artificial Sequence
  bisulfite treated nucleic acid for analysis of methylation status of SEQ ID NO: 31
ttcgtcgggttttatgtcgt

SEQ ID NO: 14340 - DNA, 18 bp, Artificial Sequence
  bisulfite treated nucleic acid for analysis of methylation status of SEQ ID NO: 31
tcggattcggagattttg

SEQ ID NO: 14341 - DNA, 17 bp, Artificial Sequence
  bisulfite treated nucleic acid for analysis of methylation status of SEQ ID NO: 31
gttggtgatattcgcgg

SEQ ID NO: 14342 - DNA, 19 bp, Artificial Sequence
  bisulfite treated nucleic acid for analysis of methylation status of SEQ ID NO: 31
gcaattcctacgattcgac

SEQ ID NO: 14343 - DNA, 19 bp, Artificial Sequence
  bisulfite treated nucleic acid for analysis of methylation status of SEQ ID NO: 31
tttggaattgtggtgttgt

SEQ ID NO: 14344 - DNA, 22 bp, Artificial Sequence
  bisulfite treated nucleic acid for analysis of methylation status of SEQ ID NO: 31
gtaaacgacacgcaattcctac

SEQ ID NO: 14345 - DNA, 19 bp, Artificial Sequence
  bisulfite treated nucleic acid for analysis of methylation status of SEQ ID NO: 31
tattcggttagtttgtgcg

SEQ ID NO: 14346 - DNA, 21 bp, Artificial Sequence
  bisulfite treated nucleic acid for analysis of methylation status of SEQ ID NO: 31
ataactacgacataaaacccg

SEQ ID NO: 14347 - DNA, 23 bp, Artificial Sequence
  bisulfite treated nucleic acid for analysis of methylation status of SEQ ID NO: 31
gaaactaactacgaaaaccgact

SEQ ID NO: 14348 - DNA, 18 bp, Artificial Sequence
  bisulfite treated nucleic acid for analysis of methylation status of SEQ ID NO: 31
ttcggttagtttgtgcgt

SEQ ID NO: 14349 - DNA, 21 bp, Artificial Sequence
  bisulfite treated nucleic acid for analysis of methylation status of SEQ ID NO: 31
taaacgacacgcaattcctac

SEQ ID NO: 14350 - DNA, 21 bp, Artificial Sequence
  bisulfite treated nucleic acid for analysis of methylation status of SEQ ID NO: 31
ctaataaataaacccgaccga

SEQ ID NO: 14351 - DNA, 17 bp, Artificial Sequence
  bisulfite treated nucleic acid for analysis of methylation status of SEQ ID NO: 31
ttcgttgtttcggggta

SEQ ID NO: 14352 - DNA, 18 bp, Artificial Sequence
  bisulfite treated nucleic acid for analysis of methylation status of SEQ ID NO: 31
ttgagttacggtgttcgt

SEQ ID NO: 14353 - DNA, 19 bp, Artificial Sequence
  bisulfite treated nucleic acid for analysis of methylation status of SEQ ID NO: 31
gacacgcaattcctacgat

SEQ ID NO: 14354 - DNA, 19 bp, Artificial Sequence
  bisulfite treated nucleic acid for analysis of methylation status of SEQ ID NO: 31
ttcggattcggagattttg

SEQ ID NO: 14355 - DNA, 21 bp, Artificial Sequence
  bisulfite treated nucleic acid for analysis of methylation status of SEQ ID NO: 31
gttattcggttagtttgtgcg

SEQ ID NO: 14356 - DNA, 19 bp, Artificial Sequence
  bisulfite treated nucleic acid for analysis of methylation status of SEQ ID NO: 31
ctacgacataaaacccgac

SEQ ID NO: 14357 - DNA, 19 bp, Artificial Sequence
  bisulfite treated nucleic acid for analysis of methylation status of SEQ ID NO: 31
gttggtgatattcgcggag

SEQ ID NO: 14358 - DNA, 16 bp, Artificial Sequence
  bisulfite treated nucleic acid for analysis of methylation status of SEQ ID NO: 31
ttggtgatattcgcgg

SEQ ID NO: 14359 - DNA, 18 bp, Artificial Sequence
  bisulfite treated nucleic acid for analysis of methylation status of SEQ ID NO: 31
ttggtgatattcgcggag

SEQ ID NO: 14360 - DNA, 20 bp, Artificial Sequence
  bisulfite treated nucleic acid for analysis of methylation status of SEQ ID NO: 31
ttattcggttagtttgtgcg

SEQ ID NO: 14361 - DNA, 22 bp, Artificial Sequence
  nucleic acid for analysis of methylation status of SEQ ID NO: 31
aactacgaaaaccgactaaaat

SEQ ID NO: 14362 - DNA, 22 bp, Artificial Sequence
  bisulfite treated nucleic acid for analysis of methylation status of SEQ ID NO: 31
atttattttttggagggtgtga

SEQ ID NO: 14363 - DNA, 19 bp, Artificial Sequence
  bisulfite treated nucleic acid for analysis of methylation status of SEQ ID NO: 31
aacgacacgcaattcctac

SEQ ID NO: 14364 - DNA, 25 bp, Artificial Sequence
  bisulfite treated nucleic acid for analysis of methylation status of SEQ ID NO: 31
ataaataactacgacataaaacccg

SEQ ID NO: 14365 - DNA, 21 bp, Artificial Sequence
  bisulfite treated nucleic acid for analysis of methylation status of SEQ ID NO: 31
tacgaaaaccgactaaaatct

SEQ ID NO: 14366 - DNA, 20 bp, Artificial Sequence
  bisulfite treated nucleic acid for analysis of methylation status of SEQ ID NO: 31
caattcctacgattcgacaa

SEQ ID NO: 14367 - DNA, 18 bp, Artificial Sequence
  bisulfite treated nucleic acid for analysis of methylation status of SEQ ID NO: 31
tcggttagtttgtgcgtt

SEQ ID NO: 14368 - DNA, 22 bp, Artificial Sequence
  bisulfite treated nucleic acid for analysis of methylation status of SEQ ID NO: 40
tcgattcgtaaattgttgtatt

SEQ ID NO: 14369 - DNA, 21 bp, Artificial Sequence
  bisulfite treated nucleic acid for analysis of methylation status of SEQ ID NO: 40
ctaaacttactccgaaccgtc

SEQ ID NO: 14370 - DNA, 22 bp, Artificial Sequence
  bisulfite treated nucleic acid for analysis of methylation status of SEQ ID NO: 40
agcgtttttttcgagatttcgg

SEQ ID NO: 14371 - DNA, 19 bp, Artificial Sequence
  bisulfite treated nucleic acid for analysis of methylation status of SEQ ID NO: 40
agttagtttgttgggagag

SEQ ID NO: 14372 - DNA, 22 bp, Artificial Sequence
  bisulfite treated nucleic acid for analysis of methylation status of SEQ ID NO: 40
ttcgattcgtaaattgttgtat

SEQ ID NO: 14373 - DNA, 22 bp, Artificial Sequence
  bisulfite treated nucleic acid for analysis of methylation status of SEQ ID NO: 40
attcgattcgtaaattgttgta

SEQ ID NO: 14374 - DNA, 21 bp, Artificial Sequence
  bisulfite treated nucleic acid for analysis of methylation status of SEQ ID NO: 40
ctctaaacttactccgaaccg

SEQ ID NO: 14375 - DNA, 22 bp, Artificial Sequence
  bisulfite treated nucleic acid for analysis of methylation status of SEQ ID NO: 40
cgattcgtaaattgttgtattt

SEQ ID NO: 14376 - DNA, 21 bp, Artificial Sequence
  bisulfite treated nucleic acid for analysis of methylation status of SEQ ID NO: 40
taaaacgactaactcgaccct

SEQ ID NO: 14377 - DNA, 16 bp, Artificial Sequence
  bisulfite treated nucleic acid for analysis of methylation status of SEQ ID NO: 40
gagcgggacggttcgg

SEQ ID NO: 14378 - DNA, 17 bp, Artificial Sequence
  bisulfite treated nucleic acid for analysis of methylation status of SEQ ID NO: 40
gtttagaggtagaggag

SEQ ID NO: 14379 - DNA, 20 bp, Artificial Sequence
  bisulfite treated nucleic acid for analysis of methylation status of SEQ ID NO: 40
tctaaacttactccgaaccg

SEQ ID NO: 14380 - DNA, 20 bp, Artificial Sequence
  bisulfite treated nucleic acid for analysis of methylation status of SEQ ID NO: 40
taaacttactccgaaccgtc

SEQ ID NO: 14381 - DNA, 20 bp, Artificial Sequence
  bisulfite treated nucleic acid for analysis of methylation status of SEQ ID NO: 40
acgactaactcgaccctttt

SEQ ID NO: 14382 - DNA, 20 bp, Artificial Sequence
  bisulfite treated nucleic acid for analysis of methylation status of SEQ ID NO: 40
aaacgactaactcgaccctt

SEQ ID NO: 14383 - DNA, 20 bp, Artificial Sequence
  bisulfite treated nucleic acid for analysis of methylation status of SEQ ID NO: 40
aaaacgactaactcgaccct

SEQ ID NO: 14384 - DNA, 20 bp, Artificial Sequence
  bisulfite treated nucleic acid for analysis of methylation status of SEQ ID NO: 40
aacgactaactcgacccttt

SEQ ID NO: 14385 - DNA, 22 bp, Artificial Sequence
  bisulfite treated nucleic acid for analysis of methylation status of SEQ ID NO: 40
tctaaacttactccgaaccgtc

SEQ ID NO: 14386 - DNA, 23 bp, Artificial Sequence
  bisulfite treated nucleic acid for analysis of methylation status of SEQ ID NO: 40
ttcgattcgtaaattgttgtatt

SEQ ID NO: 14387 - DNA, 20 bp, Artificial Sequence
  chemically treated genomic DNA (Homo sapiens)
cggagggtacggagattacg

SEQ ID NO: 14388 - DNA, 15 bp, Artificial Sequence
  chemically treated genomic DNA (Homo sapiens)
cgacgacgcgcgaaa

SEQ ID NO: 14389 - DNA, 29 bp, Artificial Sequence
  chemically treated genomic DNA (Homo sapiens)
cgaaaccctaaatatcccgaataacgccg

SEQ ID NO: 14390 - DNA, 25 bp, Artificial Sequence
  chemically treated genomic DNA (Homo sapiens)
tggtgatggaggaggtttagtaagt

SEQ ID NO: 14391 - DNA, 27 bp, Artificial Sequence
  chemically treated genomic DNA (Homo sapiens)
aaccaataaaacctactcctcccttaa

SEQ ID NO: 14392 - DNA, 30 bp, Artificial Sequence
  chemically treated genomic DNA (Homo sapiens)
accaccacccaacacacaataacaaacaca

SEQ ID NO: 14393 - DNA, 25 bp, Artificial Sequence
  chemically treated genomic DNA (Homo sapiens)
ggtgattgtttattgttatggtttg

SEQ ID NO: 14394 - DNA, 23 bp, Artificial Sequence
  chemically treated genomic DNA (Homo sapiens)
cccctcaacctaaaaactacaac

SEQ ID NO: 14395 - DNA, 25 bp, Artificial Sequence
  chemically treated genomic DNA (Homo sapiens)
gttatggtttgtgattttgtgtggg

SEQ ID NO: 14396 - DNA, 26 bp, Artificial Sequence
  chemically treated genomic DNA (Homo sapiens)
aaactacaaccactcaaatcaaccca

SEQ ID NO: 14397 - DNA, 25 bp, Artificial Sequence
  chemically treated genomic DNA (Homo sapiens)
aaaattacgacgacgccacccgaaa

SEQ ID NO: 14398 - DNA, 26 bp, Artificial Sequence
  chemically treated genomic DNA (Homo sapiens)
tgggattaagattttcggttagtttc

SEQ ID NO: 14399 - DNA, 23 bp, Artificial Sequence
  chemically treated genomic DNA (Homo sapiens)
cactacaacgctacgcgactaaa

SEQ ID NO: 14400 - DNA, 32 bp, Artificial Sequence
  chemically treated genomic DNA (Homo sapiens)
tcgacgttacccaaacgaatcacataaaaaac

SEQ ID NO: 14401 - DNA, 26 bp, Artificial Sequence
  chemically treated genomic DNA (Homo sapiens)
tggataggagttgggattaagatttt

SEQ ID NO: 14402 - DNA, 33 bp, Artificial Sequence
  chemically treated genomic DNA (Homo sapiens)
cttattacaatttaaaaaaaaaattcactacaa

SEQ ID NO: 14403 - DNA, 39 bp, Artificial Sequence
  chemically treated genomic DNA (Homo sapiens)
aaattcactacaacactacacaactaaattcaacattac

SEQ ID NO: 14404 - DNA, 32 bp, Artificial Sequence
  chemically treated genomic DNA (Homo sapiens)
ttttcgtattttttttcgggttattacgtttt

SEQ ID NO: 14405 - DNA, 25 bp, Artificial Sequence
  chemically treated genomic DNA (Homo sapiens)
atgtgattcgtttgggtaacgtcga

SEQ ID NO: 14406 - DNA, 21 bp, Artificial Sequence
  chemically treated genomic DNA (Homo sapiens)
tttttttttcggacgtcgttg

SEQ ID NO: 14407 - DNA, 20 bp, Artificial Sequence
  chemically treated genomic DNA (Homo sapiens)
cctctacatacgccgcgaat

SEQ ID NO: 14408 - DNA, 22 bp, Artificial Sequence
  chemically treated genomic DNA (Homo sapiens)
aattaccgaaaacatcgaccga

SEQ ID NO: 14409 - DNA, 27 bp, Artificial Sequence
  chemically treated genomic DNA (Homo sapiens)
gtagggttattgtttgggttaataaat

SEQ ID NO: 14410 - DNA, 30 bp, Artificial Sequence
  chemically treated genomic DNA (Homo sapiens)
taaaaaaaaaaaaaaaactcctctacatac

SEQ ID NO: 14411 - DNA, 29 bp, Artificial Sequence
  chemically treated genomic DNA (Homo sapiens)
aactcctctacatacaccacaaataaatt

SEQ ID NO: 14412 - DNA, 22 bp, Artificial Sequence
  chemically treated genomic DNA (Homo sapiens)
cgaaaacatcgaccgaacaacg

SEQ ID NO: 14413 - DNA, 25 bp, Artificial Sequence
  chemically treated genomic DNA (Homo sapiens)
gtccgaaaaaaaaaaaacgaactcc

SEQ ID NO: 14414 - DNA, 21 bp, Artificial Sequence
  chemically treated genomic DNA (Homo sapiens)
ggacgttttttatcgaaggcg

SEQ ID NO: 14415 - DNA, 15 bp, Artificial Sequence
  chemically treated genomic DNA (Homo sapiens)
gccacccaaccgcga

SEQ ID NO: 14416 - DNA, 22 bp, Artificial Sequence
  chemically treated genomic DNA (Homo sapiens)
acccgaaatcacgcgcgaaaaa

SEQ ID NO: 14417 - DNA, 26 bp, Artificial Sequence
  chemically treated genomic DNA (Homo sapiens)
gacggatttttttttaacgttttttc

SEQ ID NO: 14418 - DNA, 22 bp, Artificial Sequence
  chemically treated genomic DNA (Homo sapiens)
aaataaaataccacctccgcga

SEQ ID NO: 14419 - DNA, 24 bp, Artificial Sequence
  chemically treated genomic DNA (Homo sapiens)
gctcctcgcgaaatactcaccccg

SEQ ID NO: 14420 - DNA, 33 bp, Artificial Sequence
  chemically treated genomic DNA (Homo sapiens)
gttagttagttaattttttaaatagattagtag

SEQ ID NO: 14421 - DNA, 27 bp, Artificial Sequence
  chemically treated genomic DNA (Homo sapiens)
caaaaaaacaaataaaataccacctcc

SEQ ID NO: 14422 - DNA, 30 bp, Artificial Sequence
  chemically treated genomic DNA (Homo sapiens)
cctccacaaaactcactcctcacaaaatac

SEQ ID NO: 14423 - DNA, 29 bp, Artificial Sequence
  chemically treated genomic DNA (Homo sapiens)
tttcgttttgtatggtagatacggggtga

SEQ ID NO: 14424 - DNA, 36 bp, Artificial Sequence
  chemically treated genomic DNA (Homo sapiens)
attaatggttttataagacggatttttttttaacgt

SEQ ID NO: 14425 - DNA, 17 bp, Homo Sapiens
tggacgcaggaaagcga

SEQ ID NO: 14426 - DNA, 20 bp, Homo Sapiens
acccacgggagtcccatcgc

SEQ ID NO: 14427 - DNA, 17 bp, Homo Sapiens
actagtccgggtcgcgt

SEQ ID NO: 14428 - DNA, 18 bp, Homo Sapiens
cacacgaaagggaggcgg

SEQ ID NO: 14429 - DNA, 18 bp, Homo Sapiens
ggcgtgtcgccagcctta

SEQ ID NO: 14430 - DNA, 18 bp, Homo Sapiens
tccgactgacgtcagcga

SEQ ID NO: 14431 - DNA, 16 bp, Homo Sapiens
cttcgagtctgacggc

SEQ ID NO: 14432 - DNA, 16 bp, Homo Sapiens
cccggagggcgcacct

SEQ ID NO: 14433 - DNA, 16 bp, Homo Sapiens
catccctggcagcagc

SEQ ID NO: 14434 - DNA, 17 bp, Homo Sapiens
taacaaagtaaaaaatt

SEQ ID NO: 14435 - DNA, 16 bp, Homo Sapiens
tggaccagactggtga

SEQ ID NO: 14436 - DNA, 16 bp, Homo Sapiens
gatcatgcaagtcgat

SEQ ID NO: 14437 - DNA, 16 bp, Homo Sapiens
tgtaaattataataaa

SEQ ID NO: 14438 - DNA, 16 bp, Homo Sapiens
agctaagcacttcact

SEQ ID NO: 14439 - DNA, 17 bp, Homo Sapiens
gtgctccgaagtatctt

SEQ ID NO: 14440 - DNA, 18 bp, Homo Sapiens
gcaactatccccctcctc

SEQ ID NO: 14441 - DNA, 16 bp, Homo Sapiens
cagtccaggggtctgc

SEQ ID NO: 14442 - DNA, 16 bp, Homo Sapiens
ccggacgtcaacaacc

SEQ ID NO: 14443 - DNA, 16 bp, Homo Sapiens
cacgcagttgcgcgct

SEQ ID NO: 14444 - DNA, 16 bp, Homo Sapiens
aaccggcggccaggat

SEQ ID NO: 14445 - DNA, 16 bp, Homo Sapiens
tctgaccgggcttgag

SEQ ID NO: 14446 - DNA, 18 bp, Homo Sapiens
cctgagcactcgcaggaa

SEQ ID NO: 14447 - DNA, 16 bp, Homo Sapiens
agaggcgcgggttaca

SEQ ID NO: 14448 - DNA, 18 bp, Homo Sapiens
ctagcggccaagctgcga

SEQ ID NO: 14449 - DNA, 20 bp, Homo Sapiens
ggtcgacgaggaggtgcaag

SEQ ID NO: 14450 - DNA, 16 bp, Homo Sapiens
acgtgggaagaggcag

SEQ ID NO: 14451 - DNA, 17 bp, Homo Sapiens
ccgcccgcatccctctg

SEQ ID NO: 14452 - DNA, 17 bp, Homo Sapiens
tggccggcatatttcga

SEQ ID NO: 14453 - DNA, 16 bp, Homo Sapiens
ggaggttccggttcga

SEQ ID NO: 14454 - DNA, 16 bp, Homo Sapiens
ccagcggcaacagcgg

SEQ ID NO: 14455 - DNA, 21 bp, Artificial Sequence
  chemically treated genomic DNA (Homo sapiens)
tttttttttcggacgtcgttg

SEQ ID NO: 14456 - DNA, 20 bp, Artificial Sequence
  chemically treated genomic DNA (Homo sapiens)
cctctacatacgccgcgaat

SEQ ID NO: 14457 - DNA, 22 bp, Artificial Sequence
  chemically treated genomic DNA (Homo sapiens)
aattaccgaaaacatcgaccga

SEQ ID NO: 14458 - DNA, 20 bp, Artificial Sequence
  chemically treated genomic DNA (Homo sapiens)
gacgggggttctggacttac

SEQ ID NO: 14459 - DNA, 19 bp, Artificial Sequence
  chemically treated genomic DNA (Homo sapiens)
ccagtccctggatgttgct

SEQ ID NO: 14460 - DNA, 20 bp, Artificial Sequence
  chemically treated genomic DNA (Homo sapiens)
gctaagccggagtcaccaag

SEQ ID NO: 14461 - DNA, 19 bp, Artificial Sequence
  chemically treated genomic DNA (Homo sapiens)
cgctgagaccgagaagaag

SEQ ID NO: 14462 - DNA, 18 bp, Artificial Sequence
  chemically treated genomic DNA (Homo sapiens)
gccgacgagaccaaggag

SEQ ID NO: 14463 - DNA, 19 bp, Artificial Sequence
  chemically treated genomic DNA (Homo sapiens)
atgagcagcgtgaagacga

SEQ ID NO: 14464 - DNA, 19 bp, Artificial Sequence
  chemically treated genomic DNA (Homo sapiens)
cgtgccatcccaagagttt

SEQ ID NO: 14465 - DNA, 19 bp, Artificial Sequence
  chemically treated genomic DNA (Homo sapiens)
atgaccctggctttggtgt

SEQ ID NO: 14466 - DNA, 19 bp, Artificial Sequence
  chemically treated genomic DNA (Homo sapiens)
cgcagtaagaggcgacaac

SEQ ID NO: 14467 - DNA, 18 bp, Artificial Sequence
  chemically treated genomic DNA (Homo sapiens)
aaggggtctacgggcact

SEQ ID NO: 14468 - DNA, 19 bp, Artificial Sequence
  chemically treated genomic DNA (Homo sapiens)
tctggaaggaggacgtgaa

SEQ ID NO: 14469 - DNA, 18 bp, Artificial Sequence
  chemically treated genomic DNA (Homo sapiens)
aaggggtctacgggcact

SEQ ID NO: 14470 - DNA, 19 bp, Artificial Sequence
  chemically treated genomic DNA (Homo sapiens)
gttgaagtcgcccaggaac

SEQ ID NO: 14471 - DNA, 18 bp, Artificial Sequence
  chemically treated genomic DNA (Homo sapiens)
agtggggcaccgacgtaa

SEQ ID NO: 14472 - DNA, 20 bp, Artificial Sequence
  chemically treated genomic DNA (Homo sapiens)
ccattttacttggggtgtgg

SEQ ID NO: 14473 - DNA, 21 bp, Artificial Sequence
  chemically treated genomic DNA (Homo sapiens)
ctggagctgtcaggagaaaag

SEQ ID NO: 14474 - DNA, 18 bp, Artificial Sequence
  chemically treated genomic DNA (Homo sapiens)
gtcgccccctacccttct

SEQ ID NO: 14475 - DNA, 21 bp, Artificial Sequence
  chemically treated genomic DNA (Homo sapiens)
cccaagaccttaacccaagtc

SEQ ID NO: 14476 - DNA, 20 bp, Artificial Sequence
  chemically treated genomic DNA (Homo sapiens)
ctccaaacgcgataccctct

SEQ ID NO: 14477 - DNA, 20 bp, Artificial Sequence
  chemically treated genomic DNA (Homo sapiens)
gtgactcctccccttccttc

SEQ ID NO: 14478 - DNA, 20 bp, Artificial Sequence
  chemically treated genomic DNA (Homo sapiens)
gccttaactgctggggtctt

SEQ ID NO: 14479 - DNA, 20 bp, Artificial Sequence
  chemically treated genomic DNA (Homo sapiens)
gatggagatggctgaagtgg

SEQ ID NO: 14480 - DNA, 19 bp, Artificial Sequence
  chemically treated genomic DNA (Homo sapiens)
gtccatcggtttcgtctcc

SEQ ID NO: 14481 - DNA, 21 bp, Artificial Sequence
  chemically treated genomic DNA (Homo sapiens)
ccaccgtgtagaagttgtcgt

SEQ ID NO: 14482 - DNA, 17 bp, Artificial Sequence
  chemically treated genomic DNA (Homo sapiens)
agggcgttttgttggcg

SEQ ID NO: 14483 - DNA, 21 bp, Artificial Sequence
  chemically treated genomic DNA (Homo sapiens)
ctacaacctaaacgacgcgct

SEQ ID NO: 14484 - DNA, 21 bp, Artificial Sequence
  chemically treated genomic DNA (Homo sapiens)
atcggcgttttagcgtgcggg

SEQ ID NO: 14485 - DNA, 25 bp, Artificial Sequence
  chemically treated genomic DNA (Homo sapiens)
aaaaaaaaaaaactcctctacatac

SEQ ID NO: 14486 - DNA, 24 bp, Artificial Sequence
  chemically treated genomic DNA (Homo sapiens)
ggttattgtttgggttaataaatg

SEQ ID NO: 14487 - DNA, 38 bp, Artificial Sequence
  chemically treated genomic DNA (Homo sapiens)
acatacaccacaaataaattaccaaaaacatcaaccaa

SEQ ID NO: 14488 - DNA, 21 bp, Artificial Sequence
  chemically treated genomic DNA (Homo sapiens)
ttttttttttcggacgtcgtt

SEQ ID NO: 14489 - DNA, 20 bp, Artificial Sequence
  chemically treated genomic DNA (Homo sapiens)
tcggtcgatgttttcggtaa

SEQ ID NO: 14490 - DNA, 17 bp, Artificial Sequence
  chemically treated genomic DNA (Homo sapiens)
acggcgttttggttcgt

SEQ ID NO: 14491 - DNA, 27 bp, Artificial Sequence
  chemically treated genomic DNA (Homo sapiens)
cgacttaataacgacgtacgcgaaccc

SEQ ID NO: 14492 - DNA, 26 bp, Artificial Sequence
  chemically treated genomic DNA (Homo sapiens)
gtcatctaacaacgacctaactaacg

SEQ ID NO: 14493 - DNA, 21 bp, Artificial Sequence
  chemically treated genomic DNA (Homo sapiens)
ctctaaaccgcgaaaactccg

SEQ ID NO: 14494 - DNA, 21 bp, Artificial Sequence
  chemically treated genomic DNA (Homo sapiens)
cgcgtttgttcgggtttcggg

SEQ ID NO: 14495 - DNA, 23 bp, Artificial Sequence
  chemically treated genomic DNA (Homo sapiens)
gggatgagaggttgttgacgttc

SEQ ID NO: 14496 - DNA, 17 bp, Artificial Sequence
  chemically treated genomic DNA (Homo sapiens)
agggcgttttgttggcg

SEQ ID NO: 14497 - DNA, 21 bp, Artificial Sequence
  chemically treated genomic DNA (Homo sapiens)
atcggcgttttagcgtgcggg

SEQ ID NO: 14498 - DNA, 21 bp, Artificial Sequence
  chemically treated genomic DNA (Homo sapiens)
ctacaacctaaacgacgcgct

SEQ ID NO: 14499 - DNA, 20 bp, Artificial Sequence
  chemically treated genomic DNA (Homo sapiens)
gaggtttcggttcgaggttc

SEQ ID NO: 14500 - DNA, 36 bp, Artificial Sequence
  chemically treated genomic DNA (Homo sapiens)
acgtcacaaaaaaaaaacccacgtaataataacgaa

SEQ ID NO: 14501 - DNA, 22 bp, Artificial Sequence
  chemically treated genomic DNA (Homo sapiens)
ctttactacaacgaaaacgccg

SEQ ID NO: 14502 - DNA, 28 bp, Artificial Sequence
  chemically treated genomic DNA (Homo sapiens)
gattaaaaaatttgtttttattcggtcg

SEQ ID NO: 14503 - DNA, 23 bp, Artificial Sequence
  chemically treated genomic DNA (Homo sapiens)
cgcggaagtagagtaggcgggcg

SEQ ID NO: 14504 - DNA, 19 bp, Artificial Sequence
  chemically treated genomic DNA (Homo sapiens)
tccgcttcgaaaacctcga

SEQ ID NO: 14505 - DNA, 22 bp, Artificial Sequence
  chemically treated genomic DNA (Homo sapiens)
caaaatccgtcgacgataaaac

SEQ ID NO: 14506 - DNA, 22 bp, Artificial Sequence
  chemically treated genomic DNA (Homo sapiens)
tcgggttggggttcgtattcgg

SEQ ID NO: 14507 - DNA, 31 bp, Artificial Sequence
  chemically treated genomic DNA (Homo sapiens)
acgtagttataggttttgatagttttaggga

SEQ ID NO: 14508 - DNA, 24 bp, Artificial Sequence
  chemically treated genomic DNA (Homo sapiens)
gaacgcgaaaaaattaacatctcg

SEQ ID NO: 14509 - DNA, 35 bp, Artificial Sequence
  chemically treated genomic DNA (Homo sapiens)
tttcgtttttatcgtggtgggtatgttcgtgttta

SEQ ID NO: 14510 - DNA, 23 bp, Artificial Sequence
  chemically treated genomic DNA (Homo sapiens)
tttcgggattgttgttggtgttt

SEQ ID NO: 14511 - DNA, 34 bp, Artificial Sequence
  chemically treated genomic DNA (Homo sapiens)
catcaatatcctaatcataacctactatctatcg

SEQ ID NO: 14512 - DNA, 23 bp, Artificial Sequence
  chemically treated genomic DNA (Homo sapiens)
taggtttagtcgcgcgttcgcga

SEQ ID NO: 14513 - DNA, 23 bp, Artificial Sequence
  chemically treated genomic DNA (Homo sapiens)
gagatggggaattttttgacgtc

SEQ ID NO: 14514 - DNA, 29 bp, Artificial Sequence
  chemically treated genomic DNA (Homo sapiens)
cttaaaataataacgcgaaatataacgct

SEQ ID NO: 14515 - DNA, 27 bp, Artificial Sequence
  chemically treated genomic DNA (Homo sapiens)
cgaaaaacgatcgaaatcccgactttc

SEQ ID NO: 14516 - DNA, 19 bp, Artificial Sequence
  chemically treated genomic DNA (Homo sapiens)
tttgcggaaagacgtcgtt

SEQ ID NO: 14517 - DNA, 19 bp, Artificial Sequence
  chemically treated genomic DNA (Homo sapiens)
ccaaaaatacgcgaccacg

SEQ ID NO: 14518 - DNA, 38 bp, Artificial Sequence
  chemically treated genomic DNA (Homo sapiens)
ctaaaccactaatattcgacgtaattctccgtatttac

SEQ ID NO: 14519 - DNA, 23 bp, Artificial Sequence
  chemically treated genomic DNA (Homo sapiens)
cgttttttcgtattcggaaagac

SEQ ID NO: 14520 - DNA, 18 bp, Artificial Sequence
  chemically treated genomic DNA (Homo sapiens)
tacgtgtgaggggttcgc

SEQ ID NO: 14521 - DNA, 31 bp, Artificial Sequence
  chemically treated genomic DNA (Homo sapiens)
ccaatcgaaactatccaaatacgataaccga

SEQ ID NO: 14522 - DNA, 26 bp, Artificial Sequence
  chemically treated genomic DNA (Homo sapiens)
ccaataaaaattcgtaaaaaaaaacg

SEQ ID NO: 14523 - DNA, 17 bp, Artificial Sequence
  chemically treated genomic DNA (Homo sapiens)
cggttagtcggaggcgc

SEQ ID NO: 14524 - DNA, 29 bp, Artificial Sequence
  chemically treated genomic DNA (Homo sapiens)
cgaacgaaacaacctaaacgaaaaccccg

SEQ ID NO: 14525 - DNA, 21 bp, Artificial Sequence
  chemically treated genomic DNA (Homo sapiens)
ccaaaataaccaatcgacccg

SEQ ID NO: 14526 - DNA, 17 bp, Artificial Sequence
  chemically treated genomic DNA (Homo sapiens)
cggttagtcggaggcgc

SEQ ID NO: 14527 - DNA, 29 bp, Artificial Sequence
  chemically treated genomic DNA (Homo sapiens)
cgaacgaaacaacctaaacgaaaaccccg

SEQ ID NO: 14528 - DNA, 21 bp, Artificial Sequence
  chemically treated genomic DNA (Homo sapiens)
ccaaaataaccaatcgacccg

SEQ ID NO: 14529 - DNA, 17 bp, Artificial Sequence
  chemically treated genomic DNA (Homo sapiens)
gggttagggtgggtcgc

SEQ ID NO: 14530 - DNA, 19 bp, Artificial Sequence
  chemically treated genomic DNA (Homo sapiens)
cgtcggcgtgggcgatgtc

SEQ ID NO: 14531 - DNA, 16 bp, Artificial Sequence
  chemically treated genomic DNA (Homo sapiens)
gactcccgccccaacg

SEQ ID NO: 14532 - DNA, 20 bp, Artificial Sequence
  chemically treated genomic DNA (Homo sapiens)
cggagggtacggagattacg

SEQ ID NO: 14533 - DNA, 29 bp, Artificial Sequence
  chemically treated genomic DNA (Homo sapiens)
cgaaaccctaaatatcccgaataacgccg

SEQ ID NO: 14534 - DNA, 15 bp, Artificial Sequence
  chemically treated genomic DNA (Homo sapiens)
cgacgacgcgcgaaa

SEQ ID NO: 14535 - DNA, 19 bp, Artificial Sequence
  chemically treated genomic DNA (Homo sapiens)
cgtacgaacgcaacaaccg

SEQ ID NO: 14536 - DNA, 18 bp, Artificial Sequence
  chemically treated genomic DNA (Homo sapiens)
gttcggcgttgtttaggc

SEQ ID NO: 14537 - DNA, 21 bp, Artificial Sequence
  chemically treated genomic DNA (Homo sapiens)
gcatcttccaacaccgtcccg

SEQ ID NO: 14538 - DNA, 19 bp, Artificial Sequence
  chemically treated genomic DNA (Homo sapiens)
ctccgcatccttccccgaa

SEQ ID NO: 14539 - DNA, 20 bp, Artificial Sequence
  chemically treated genomic DNA (Homo sapiens)
ccgaacaaacgtaatacgcg

SEQ ID NO: 14540 - DNA, 16 bp, Artificial Sequence
  chemically treated genomic DNA (Homo sapiens)
acggcgtgaaggagcg

SEQ ID NO: 14541 - DNA, 20 bp, Artificial Sequence
  chemically treated genomic DNA (Homo sapiens)
tacgcgcggtagtcgtgcgc

SEQ ID NO: 14542 - DNA, 19 bp, Artificial Sequence
  chemically treated genomic DNA (Homo sapiens)
cgacaaaatcctcatcgcg

SEQ ID NO: 14543 - DNA, 20 bp, Artificial Sequence
  chemically treated genomic DNA (Homo sapiens)
gtcgtttagcgttgggaagc

SEQ ID NO: 14544 - DNA, 34 bp, Artificial Sequence
  chemically treated genomic DNA (Homo sapiens)
tacgtacgagtttcgtacgcgtattatttcgtcg

SEQ ID NO: 14545 - DNA, 20 bp, Artificial Sequence
  chemically treated genomic DNA (Homo sapiens)
acttaaaaatcgccgaatcg

SEQ ID NO: 14546 - DNA, 32 bp, Artificial Sequence
  chemically treated genomic DNA (Homo sapiens)
agttttatagttaattagggtagttgtcgtcg

SEQ ID NO: 14547 - DNA, 21 bp, Artificial Sequence
  chemically treated genomic DNA (Homo sapiens)
tcctatcatcgctcacgaacg

SEQ ID NO: 14548 - DNA, 27 bp, Artificial Sequence
  chemically treated genomic DNA (Homo sapiens)
cgacaacgactatccttactattataa

SEQ ID NO: 14549 - DNA, 23 bp, Artificial Sequence
  chemically treated genomic DNA (Homo sapiens)
ggtgttgtttattttagagagtt

SEQ ID NO: 14550 - DNA, 17 bp, Artificial Sequence
  chemically treated genomic DNA (Homo sapiens)
cctaacccctatccttc

SEQ ID NO: 14551 - DNA, 29 bp, Artificial Sequence
  chemically treated genomic DNA (Homo sapiens)
ccttcaccaccttcccaacactacaacac

SEQ ID NO: 14552 - DNA, 18 bp, Artificial Sequence
  chemically treated genomic DNA (Homo sapiens)
tcggcgtcggtcgttagg

SEQ ID NO: 14553 - DNA, 22 bp, Artificial Sequence
  chemically treated genomic DNA (Homo sapiens)
cgcgggagtagttagatgcgtc

SEQ ID NO: 14554 - DNA, 20 bp, Artificial Sequence
  chemically treated genomic DNA (Homo sapiens)
tgagagagagagggttgaaa

SEQ ID NO: 14555 - DNA, 24 bp, Artificial Sequence
  chemically treated genomic DNA (Homo sapiens)
tctaaataacaaaatacctccatt

SEQ ID NO: 14556 - DNA, 16 bp, Artificial Sequence
  chemically treated genomic DNA (Homo sapiens)
cgacccgccaaccgac

SEQ ID NO: 14557 - DNA, 15 bp, Artificial Sequence
  chemically treated genomic DNA (Homo sapiens)
cgccgaaacgcgctc

SEQ ID NO: 14558 - DNA, 27 bp, Artificial Sequence
  chemically treated genomic DNA (Homo sapiens)
ccattaccaacacaacccaccaaccaa

SEQ ID NO: 14559 - DNA, 25 bp, Artificial Sequence
  chemically treated genomic DNA (Homo sapiens)
aaaaaaaaaaaactcctctacatac

SEQ ID NO: 14560 - DNA, 24 bp, Artificial Sequence
  chemically treated genomic DNA (Homo sapiens)
ggttattgtttgggttaataaatg

SEQ ID NO: 14561 - DNA, 38 bp, Artificial Sequence; identical to SEQ ID NO: 14487
  chemically treated genomic DNA (Homo sapiens)

SEQ ID NO: 14562 - DNA, 21 bp, Artificial Sequence
  chemically treated genomic DNA (Homo sapiens)
ttttttttttcggacgtcgtt

SEQ ID NO: 14563 - DNA, 20 bp, Artificial Sequence
  chemically treated genomic DNA (Homo sapiens)
tcggtcgatgttttcggtaa

SEQ ID NO: 14564 - DNA, 25 bp, Artificial Sequence
  chemically treated genomic DNA (Homo sapiens)
aaaaaaaaaaaactcctctacatac

SEQ ID NO: 14565 - DNA, 24 bp, Artificial Sequence
  chemically treated genomic DNA (Homo sapiens)
ggttattgtttgggttaataaatg

SEQ ID NO: 14566 - DNA, 36 bp, Artificial Sequence
  chemically treated genomic DNA (Homo sapiens)
ctctacatacaccacaaataaattaccaaaaacatc

SEQ ID NO: 14567 - DNA, 24 bp, Artificial Sequence
  chemically treated genomic DNA (Homo sapiens)
cgcgaataaattaccgaaaacatc

SEQ ID NO: 14568 - DNA, 17 bp, Artificial Sequence
  chemically treated genomic DNA (Homo sapiens)
accgaacaacgacgtcc

SEQ ID NO: 14569 - DNA, 21 bp, Artificial Sequence
  chemically treated genomic DNA (Homo sapiens)
gaggtgttagaggagtagtag

SEQ ID NO: 14570 - DNA, 17 bp, Artificial Sequence
  chemically treated genomic DNA (Homo sapiens)
tccccctacaacctaaa

SEQ ID NO: 14571 - DNA, 37 bp, Artificial Sequence
  chemically treated genomic DNA (Homo sapiens)
acctaaacaacacactcccacacactaaaacaccaat

SEQ ID NO: 14572 - DNA, 15 bp, Artificial Sequence
  chemically treated genomic DNA (Homo sapiens)
cgagtcggcgcggga

SEQ ID NO: 14573 - DNA, 15 bp, Artificial Sequence
  chemically treated genomic DNA (Homo sapiens)
cgagtcggcgcggga

SEQ ID NO: 14574 - DNA, 28 bp, Artificial Sequence
  chemically treated genomic DNA (Homo sapiens)
ctatccatatacctaactaattaataac

SEQ ID NO: 14575 - DNA, 32 bp, Artificial Sequence
  chemically treated genomic DNA (Homo sapiens)
gtaaagtttttaatttttattagtattagtat

SEQ ID NO: 14576 - DNA, 40 bp, Artificial Sequence
  chemically treated genomic DNA (Homo sapiens)
atttagttaaagtttatgtcgattatagttacgttagttt

SEQ ID NO: 14577 - DNA, 40 bp, Artificial Sequence; identical to SEQ ID NO: 14576
  chemically treated genomic DNA (Homo sapiens)

SEQ ID NO: 14578 - DNA, 20 bp, Artificial Sequence
  chemically treated genomic DNA (Homo sapiens)
gtgaacggtttcgtcgggag

SEQ ID NO: 14579 - DNA, 23 bp, Artificial Sequence
  chemically treated genomic DNA (Homo sapiens)
gttttattgtatgatgaattgga

SEQ ID NO: 14580 - DNA, 21 bp, Artificial Sequence
  chemically treated genomic DNA (Homo sapiens)
caccaaaaaaatattaaccac

SEQ ID NO: 14581 - DNA, 39 bp, Artificial Sequence
  chemically treated genomic DNA (Homo sapiens)
ttaaccacaacacaaataaaaccaaacaaattatccata

SEQ ID NO: 14582 - DNA, 26 bp, Artificial Sequence
  chemically treated genomic DNA (Homo sapiens)
gttttttcgcgttcgtcgtttatttt

SEQ ID NO: 14583 - DNA, 23 bp, Artificial Sequence
  chemically treated genomic DNA (Homo sapiens)
ttgggtcgacgagattaaggagg

SEQ ID NO: 14584 - DNA, 21 bp, Artificial Sequence
  chemically treated genomic DNA (Homo sapiens)
gagaggtttattaaggtaggg

SEQ ID NO: 14585 - DNA, 28 bp, Artificial Sequence
  chemically treated genomic DNA (Homo sapiens)
ctactaccaaaaataaaaaattattaac

SEQ ID NO: 14586 - DNA, 39 bp, Artificial Sequence
  chemically treated genomic DNA (Homo sapiens)
aaaattattaacatccaacacatttatccaaacttcaaa

SEQ ID NO: 14587 - DNA, 26 bp, Artificial Sequence
  chemically treated genomic DNA (Homo sapiens)
gtttaggggtttgtagagaagttcga

SEQ ID NO: 14588 - DNA, 17 bp, Artificial Sequence
  chemically treated genomic DNA (Homo sapiens)
tcggataaacgcgtcgg

SEQ ID NO: 14589 - DNA, 24 bp, Artificial Sequence
  chemically treated genomic DNA (Homo sapiens)
gagttgagagaatttttaaatttt

SEQ ID NO: 14590 - DNA, 21 bp, Artificial Sequence
  chemically treated genomic DNA (Homo sapiens)
tcttctaaaacaaaaaacacc

SEQ ID NO: 14591 - DNA, 26 bp, Artificial Sequence
  chemically treated genomic DNA (Homo sapiens)
caccactacaatccaaacaacccaaa

SEQ ID NO: 14592 - DNA, 20 bp, Artificial Sequence
  chemically treated genomic DNA (Homo sapiens)
ggacgtcgagcgttgggtat

SEQ ID NO: 14593 - DNA, 20 bp, Artificial Sequence
  chemically treated genomic DNA (Homo sapiens)
aggacgcgtagttggacggt

SEQ ID NO: 14594 - DNA, 18 bp, Artificial Sequence
  chemically treated genomic DNA (Homo sapiens)
gaaggaagggaaagtttt

SEQ ID NO: 14595 - DNA, 20 bp, Artificial Sequence
  chemically treated genomic DNA (Homo sapiens)
taaaaaaaacactaccctac

SEQ ID NO: 14596 - DNA, 37 bp, Artificial Sequence
  chemically treated genomic DNA (Homo sapiens)
ctaccacaataaaaacccaaaacactccttcacacca

SEQ ID NO: 14597 - DNA, 20 bp, Artificial Sequence
  chemically treated genomic DNA (Homo sapiens)
acccgaaacgctccttcacg

SEQ ID NO: 14598 - DNA, 26 bp, Artificial Sequence
  chemically treated genomic DNA (Homo sapiens)
cgtaaacaaacgaaacgacgactacg

SEQ ID NO: 14599 - DNA, 28 bp, Artificial Sequence
  chemically treated genomic DNA (Homo sapiens)
cacaaactatctataaaaaattaatctc

SEQ ID NO: 14600 - DNA, 23 bp, Artificial Sequence
  chemically treated genomic DNA (Homo sapiens)
gattgttgttggtgtttgttatt

SEQ ID NO: 14601 - DNA, 47 bp, Artificial Sequence
  chemically treated genomic DNA (Homo sapiens)
ctcaaacacaaaaaaattaacatctcatctcttaaaccactttcaat

SEQ ID NO: 14602 - DNA, 22 bp, Artificial Sequence
  chemically treated genomic DNA (Homo sapiens)
tcgtctcttaaaccgctttcga

SEQ ID NO: 14603 - DNA, 25 bp, Artificial Sequence
  chemically treated genomic DNA (Homo sapiens)
cctcaaaataaacacgaacataccc

SEQ ID NO: 14604 - DNA, 24 bp, Artificial Sequence
  chemically treated genomic DNA (Homo sapiens)
atacaaaatacaaaaataccttct

SEQ ID NO: 14605 - DNA, 22 bp, Artificial Sequence
  chemically treated genomic DNA (Homo sapiens)
atttggttttattttggttatg

SEQ ID NO: 14606 - DNA, 36 bp, Artificial Sequence
  chemically treated genomic DNA (Homo sapiens)
accttctcacaaatcaactaaaacacacacaacacc

SEQ ID NO: 14607 - DNA, 18 bp, Artificial Sequence
  chemically treated genomic DNA (Homo sapiens)
tggatttagggcgtcgcg

SEQ ID NO: 14608 - DNA, 21 bp, Artificial Sequence
  chemically treated genomic DNA (Homo sapiens)
cgttcgtttattaagcggcga

SEQ ID NO: 14609 - DNA, 25 bp, Artificial Sequence
  chemically treated genomic DNA (Homo sapiens)
aaaaaaaaaaaactcctctacatac

SEQ ID NO: 14610 - DNA, 24 bp, Artificial Sequence
  chemically treated genomic DNA (Homo sapiens)
ggttattgtttgggttaataaatg

SEQ ID NO: 14611 - DNA, 20 bp, Artificial Sequence
  chemically treated genomic DNA (Homo sapiens)
acatacaccacaaataaatt

SEQ ID NO: 14612 - DNA, 18 bp, Artificial Sequence
  chemically treated genomic DNA (Homo sapiens)
accaaaaacatcaaccaa

SEQ ID NO: 14613 - DNA, 21 bp, Artificial Sequence
  chemically treated genomic DNA (Homo sapiens)
ttttttttttcggacgtcgtt

SEQ ID NO: 14614 - DNA, 20 bp, Artificial Sequence
  chemically treated genomic DNA (Homo sapiens)
tcggtcgatgttttcggtaa

SEQ ID NO: 14615 - DNA, 16 bp, Artificial Sequence
  chemically treated genomic DNA (Homo sapiens)
ggtttgggatggttgt

SEQ ID NO: 14616 - DNA, 24 bp, Artificial Sequence
  chemically treated genomic DNA (Homo sapiens)
tctaaataacaaaatacctccatt

SEQ ID NO: 14617 - DNA, 27 bp, Artificial Sequence
  chemically treated genomic DNA (Homo sapiens)
ccattaccaacacaacccaccaaccaa

SEQ ID NO: 14618 - DNA, 20 bp, Artificial Sequence
  chemically treated genomic DNA (Homo sapiens)
ggtcgcggtgagagagagag

SEQ ID NO: 14619 - DNA, 21 bp, Artificial Sequence
  chemically treated genomic DNA (Homo sapiens)
tgaaattagagcgcgtttcgg

SEQ ID NO: 14620 - DNA, 23 bp, Artificial Sequence
  chemically treated genomic DNA (Homo sapiens)
ggtgttgtttattttagagagtt

SEQ ID NO: 14621 - DNA, 17 bp, Artificial Sequence
  chemically treated genomic DNA (Homo sapiens)
cctaacccctatccttc

SEQ ID NO: 14622 - DNA, 29 bp, Artificial Sequence
  chemically treated genomic DNA (Homo sapiens)
ccttcaccaccttcccaacactacaacac

SEQ ID NO: 14623 - DNA, 19 bp, Artificial Sequence
  chemically treated genomic DNA (Homo sapiens)
tggggtttcggcgaagtaa

SEQ ID NO: 14624 - DNA, 18 bp, Artificial Sequence
  chemically treated genomic DNA (Homo sapiens)
tttttcggcgtcggtcgt
